United States Patent Application Publication US 2026/0191916 A1 - sequence listing, part 36

SEQ ID NO: 102 - DNA, 5446 bp, Bacteroides uniformis
  source 1..5446: mol_type = genomic DNA
ggccagatacttcgtcagggtcagcttgcccctcagtcccgaatgccggtcatccacggcacccgtctgtgtatacgttccgtagtcgtaatacttcttcagcagggttccgtcgtcttcccggtctatctccagcacgaagcgctccagcttgccgctgccgttcagtctggcctggtgcaggcgttccagcatagcgaacccgtcgatgccggggcagttggtgtagcggtagccccgcacattattgatcccttccagtatcaggccactatcggacagcttggtcagatattccaggaacagttcctcaatcgtgtccggcaggcataactgcacaacgggcgcaccggtggccagtttcacacgggtcagccccgtacccctcacgtccagtttcttcaggcggccctgccagctcaagtccaaagtggccacattcccgttgtccccgttccgggccagccggttgttccgcatgttcacttcttccagaagcagcataccattggtcgaagccatgaacgagccgttccggtaaccgctggctttctccacgctcatgtcgagttttaccagtgaggtcagcagaccgaagttgaagccgattgcgaacgcatcctcgtgccataccagctccttgattttggctgcaccgataatcttcagcgggtcgttctcaccgaaggcacgggtcagctgcagggaatggagcacgtccgcatccaccacgccgctgtcggcctgcacgccgttgctggtggagagctgcacacggtacgggatggtcagccggtactgcatcggtttcagtttataagccttgtccagcgatgccgtactctggtagaactgggcacccagcgtggatacatagccgtactccacctgcttcaggtcataccggcgttggatgaagtagttccggtgtgctttcaacgaacccttcagaccgtagatttgcggataggtctgtttggcaccgtcagcacccaccggcatttcgttcaggaacgggtagatgtatttgaagatgccggacttgttatagaggcgtgagcaccacttcttcatctgttcggtatcgaaatggtcaatggctttctggatactgaaggcactcatgaagcttgcgcccccgttccatccgctcaccataatctccacaatcatgtcccagcaattggccacgatgaggttccacagccacgagttatgaccctgcatcacataagccccgtcgcgcttcgtctggcggttgtcgtcatacttcccggtcaggaacgacttgttgtcagaaccgagctggcagtcgccgtcataatagtcaatcgaccatttcacaccgtcccatgtgcggataagcatgttcttcgcaagctggtccacgccgaggttgaactgcacgtacagatagtaggcaatcaggtggggaaggtcgaaatacttcccggcctctttcctgaacgtatcgctctgccacttggcggtagggaacttgtcgccgtcgtcctcatagtccaccccctcgaacgaatgggattccgtgctgtaaaccatgttcctgcccgcaggcgtttcctttacgcaccggtagacgaaactcatcatgcggtcggtggccttgtacatcttgtcgtacttgtcaccggtaccgaggtggtctttcaggttcggttcttcctccgcgtcaccgcctccgtccgaccagaaggtatctttcggatgattaaattccagtcctccgtcaaagttgtagtccatgaaatccttatgctccggttcggtactcggcaaccagtggaacaggcacagcggattggagttgttcagcgtctcgaagcagacgggcaggtactgcttgtgtccttcctcgtcggcttccaggtagttcagcgtgtcgccctcgccccatttctcgccgccgatggtctcatcctgcccgaagatggggtagctgtcgctcttctcgttgttcatgttgtactggccgtaataggtcaggtcttcgtcggcactcttcgctacgaacaggtcgcacggcaggccgtcgatggccgaacggtaatcatcctccagcccatggtctttggcgtaacgctgggcaggcgtaagcagccccatctctttcagtccgtcattgataagcttcgcacctccggtattggtggtcatggacgagtccgagaagtcgcatttggaacatgccagcttcgcgcctaccgagttcctgcgtaacttgaagagattttttttgccggtagttaccaccggattcttctgcctgccgtttccgtcaatctccccgtagctcaatgtaaccgtccagccgcttgccgtcttctggaagtagaaacggaagttctttctggcatagttcacggaagaagtaccctgaatacggacatatacgttggtaaggataaagtcaagcgtcctgtcctctccgttatagaaacggacctcccttaccagtttattggccttcttgtcgttcagctgggccagtgcatccaccacgttcagcgtgtcgctctcgctcggaacctcactgcccacgctgcccgtgcctatcagtaccaggatcgagttccggcgcttcttcatcagccccatcagcttctccatgctcaccgtatctccttcattcagcacgcggttgtcctcatccagtgagcgcacgcccggttccccgtcggcatcctccaggtggttgcggtccacgatgtagttgttcagcacctcgtccgaggtcagcgccttgttatagatacgcacgctcttcacgttcaagtcggcacctgccgacttaaattccaactggctctgaatgtcaaaattcaccttgtcgagccacttggaagcagccgactcttcaccgttcacatagaaaccgatcagcgtgcgctgttcgttggtctgcacgttcggatagaacacgtaggtaatgcggatattcgtacccggctggaacttggtacccaccgagtcttcatagcgcagcacctgtccggcatccatcgcctcggtcaccacaccggtcaggaacttggcctcttccggagtcacaatcagcccgtaccggttgccgttgtccagctgccccaggcaggtgatcagctcggcatccgtatccgtcacgttggccgtgctgtattctatctccagcgtcatgcccacgtcacggatggcaaatccctcgggcttgtccgcctcgttgaaggggcggtaaccgccgtcagcggtcagggtcatacctgcaccaccggccagcagcaggcggtccttgtgccagccgctaccggcaccatattcgttcacgctccacagcacgtcccggaactccatacgcttgtcaccgctcacccagcttgccgggttgttttccgtgttgcttcgcccgaaggcgtcaaacgtacacacggcatccggtgccagcgtggcttcaatgtccgggtgcgatgtggtgttcacctgcacctcaagcacggcatcgccgcatgacacacggtagtccaacggttccacgttcacgttcgtccgtccgtagctgccggtctcaccgcgttgcagcaggtcttccttcaccacgctgccccggtcggtcactttcacacgggccgtatacgcatcgcggtcatagccggcatacgtgaagttccatgccgtgaactgctctgcctccagcaccgggtgtttccagtcacgctggaaccccgctgcccggtggctgaacatcaggccggcatacgctgtcacacctccgcctgccttcagcagcgtaatgtaatgcacccggctcaccacaccggagttctcatgctgcgcgtaggcttccaccacgttcgtaccctcctgcatctgtgtcagggggatggtcacgttcttctgctgcacaccgctgccggccgaaagaccgagggtaaaggcctgtccgccgttcacgcggtagtagatgttcttctcaccgctcgtgcccttggcagtaaaggggatgttcacgtcatttttatatcccccgtcggccagcccgttgcccgccgagtaggtggtctccagctccatggccaccatggtcaccttggccgtggccgtcttcatcagcgtgccgtcctggtaagttgcctgcgcttccacctgtacggtataggcagtggcatccttcaggtagggcgaagcgtcaaaggtatagctctgtccggctgtaacgcccacaaactccgcatcccggaactcactgatgacggtcgaaccgcgtttcacgatcacgcgggctttcaggtcgctgtagccgtccaccgtaccgccaccggcagtgcccacacctacggagtatttcaccacaaagccgctgcccagtgccagatactgcgaggcgggaagtcccgcaccgccgctgtccgtcaggtcgatgttcaccaccaccttgtcatcgtccgtgtacttggaaaagcgcacttccttcgagctctcgccgccctggttgtccttctgcttgacggtcatcacgtactgggtgccgtcctcgctgtcctgcacatccacgtccgtcaccgtacccaccatcgcatcgaacaccgttccggatgtaggaggtttcgtctcgccgctcaccagttcctcggtaggggtacggtttgacagttccttcttcaggaacgcttcgatgtcatcgcctgcataggcatgataggtgccgtccggctgtttctgattccatggtgtttcaagattcatcggatgttcagtcgcgttgatgattccgcttattttcctttttgccataatactgtccttttataataatcattcatttatcagttttactgctaccgttccatgcgtccgatccgttccacggctcgtcgcctttccagtatccaagtccgaaacagctgcttatcgcagaccacaccagtcttgccccggcatagactgccgacagggcacgtttccccacatacgcagccgttatttccttaccgcctatggttatcatcgtcaatcctcctcataaatcagatacagcgtattcgcatccttgtcctgcagcgcctcgtaagcttccccgctcatcacctcatgccggtaggccagcagtctcaggctgccgcctgttccggtatatacggcatcacccagcaggtagagcttgtccggcaggatggctgtccggtccgcattcatgaatatgccggcaggaggcacacccgccacatcccagtccccgtacagggtggagtccatgtggtaggcgaacttcccggcatccgctacatacactacgctgccgcccggtttggtactcttgtcaggtaaaacgttgcctgtttccatccatgaggaaaagcgtgcggtagccccgccgatggctgctgccgtagtctgttccaccttggcagcggcgttttctgccttggctgccgcttcgttggccttggtggcc

SEQ ID NO: 103 - DNA, 4785 bp, Bacteroides uniformis; identical to SEQ ID NO: 6
  source 1..4785: mol_type = genomic DNA

SEQ ID NO: 104 - DNA, 4148 bp, Bacteroides uniformis; identical to SEQ ID NO: 7
  source 1..4148: mol_type = genomic DNA

SEQ ID NO: 105 - DNA, 2877 bp, Bacteroides uniformis
  source 1..2877: mol_type = genomic DNA
ccgtagatacagaaagttttgcgaagttctttttagcaggattcaaggctttttttgatttaaagcctgcatcaatcaaagtctttaaatatatccttggccaactaaaacctaatcaagacagctttatgttttttatggacgaatgcaaggaagaaacagggtattcagaagtatccatttttagagctttaggcgagctttgcagtgccgaaataatagcaagaggtagagcggatattgaatactacataaatcccatgtgcgtatttaacggtgatagggtaacattcgcaacaacttacattaatgaaaattatccacaatataagacgacatcaacaaagctgaaaggtacaatagatgtgatgaaagaacaaggagatttaccacaactgccttttgaggactaaagaacagcaacactccattgagtgagtgctgccgtttggtcgctccccctttgggggacgggagggggataaacaataattccaattaaattattatatttgcagtatgaaaaaagaattaggaaaatggctaatggacattgccaagtatataactacggcagtcgtgctttcttcaattttcggggatgtgcaagaaaagtgggtaatatacgtgggaggttcgttgtcaatagtagtaacccttttagcaggtctttggcttgttaaagacaaaaagaaaggagaataaacatgggagcattggtaatgtttggacttgtttcagtaatagccattgtcggagtggtttacttcaaccaccaagacaagaaagaagcccaaaaagcaaaataaggaactaagggtaaacgtagctcaactggacagagcactcaatttttagaggaggggttgcaggttcaaaccctgccgttctacccttacatacatcaagccgctggagatgtcgggaatccgtcaattcactccagcggctttttaatgtcagcagctctcccgtatcggtcggctaccgtttggtcagcagcaaaggtaggcaaagcatttggaatttccaagcgttttgcctacttttgttgtgcgctttcgttaatggaagtatagcccactatacttcgttccgaagtgtgggctttcggacaagccgaaaggggagggcttccgccctctttgattgcattactaaaccaaaaaaacaatagggaaaagaaatgggattcgcagtacttcacatcgaaaaaggaacagccggtaaagccggcggattgggcagccatatagaccggacaaagaaagtcctcaatgcagatccgaaactttcggaaaaaaatctattttaccatttgggcgagaatgggaaagtctatgtctatgacaatttcaagaaccgaaggtcattacaggaaagaatcaacagacgcatacaggagggttacaagggaaagacagccatccgcaaggatgccgttacccacctgaatgtagttcttacaggaagtcacgaggaaatgacagctatcggggagaatcccgaaaggctcactcaatggatgaacgagaactacaggttcgtcagcgaacggttcggggggagaaacgttgtggacttcaccctacatatggacgagcggacaccgcacattcattgtgtcgttgtgccgttaaccgtggacggcagactttccgccaaagaggtcatgggtgacagacgcaagctgtcggagttgcaggactgttacggaaaagtcatgcagaacaaattcgggcttcagaggggtattaaaggcagcaccgccacccatgacagtgtaagggagtattacggcaggatagaggaacggctcatttatccgagtaacagtatggagctgaattacgaaacaagagcaccccaaatcggcacaccgccattaatcgggcgtgaaaaatgggctgagaagcaaaataaggcgatttacgaggattttacccaaatgagagagcattacaagcacgaagcggagaaacaaagccagaaagttctaaaatacttccagaactcgaagctgcaagccgaagaaaaggcagaccgcttgcgaaaagagaatgcacagcttagaggggttatcgaggaacagcacaaaaagctgcatcccgaaaggtatatcagacataacaaaggctattcgctttaacaccctcccgtcccccaagggggagcgaccaaacggcagcactcactcaatggagtgttgctcaatgttaaacccttgtttctctttgcttttttggggttgtttttctattttggggatgagcatttcaacaacagaaggtttttttcataagaactgaaattttaaggttgcattaaaacgcaaaacttacccaaacgtggacgtggagagcccctcttttgaaggggctcttttagtttcattttttgggtaatttttgaaagtgcagaagatgaaagaaaataagctaaaaaatggcatttttgggggtatttaagagcttaagaaagaaacatagcataagttattgataatcaatataggcgactttcatactatgaaagtgggactttcatagtaagaaagtgaaagtttcataaataacacattaaaagaaactattactttcattttttactatctttgtgaaagtaataataacattcaatgttactgttactatcaaaaatcaccatgaaaatgaaagtagagtatgacaaagcgtaaactatcagatttcgagcttaacaaagaaaatccctttgcaaaacaagcattagttaatatagggagtgcacttgtttctaaatcagttaagggaacaaataaagatgaatcagccattctaaaagcagttgacggtaatggggaaattcttggtaattctgtatttatacgaaataaag

SEQ ID NO: 106 - DNA, 2783 bp, Bacteroides uniformis
  source 1..2783: mol_type = genomic DNA
aaacatacgttcggaaaaagactttagctgcccaaaagaaagaagaagcagagaaacgacagttatcacttggttttgatgaactgtaacactccattgagtgaagctgccgtttggtcgctccccctttgggggcggggggggatagataaagttcctctatgtaaagttataatgggggatgaaaggcaaggttcgctaaccttaccccgattgtttatgcttcccagcattcaatctatccccgtttatgggtttctctttcaccctacaaagataacctcatgggggaaaaatgtccaagaatatggggtaaaaactatcaagtcggtagaaaataagtatctttgaagtacatttttagtagaggtattggtatgcctagacgaagcagataggcaaaaataaagccgctggggatgtcggatgtccgtcaattaactccagcggcttgtattttggtaactctcccgtatcggtcagctaccgtttggtcagcaacaaaggtagtactttattgtcgcaaatccaaatgttttcccctttatttgtgcatttacaaaacattcactaacttcgcacctatgcagtatggtgatagcacactagcaccctaaagggtacgtgtgtaaggggacaagcccccttaaccccctgtcagccggctgtcaccggctgttatcgattgtcacaaaaatgttaacttatgggagcaacaagtattcatgtacaagcagtgaagccggggagcgagattcacaactttagggaaaaagagttggactatgttcgtccggaacttagtcatttgaatgaaagctgggttggagatagcatctcccatcggctggagagtgcgaaacagagatatttcgatacggttgggcagaagatgcagactaaagcagcacccatacgggagggggtaatagtaatcaagcaagaaaccaccatgcaggaactccagcaattcgctgcggtctgcaaggaacgtttcggtattgaagcgtttcaaatccatatacacaaggacgaaggatacatgaacgcaaagcaatggacacctaaccttcacgcccatgtagttttcgattggacgcagccgaacgggaagagtgtgcgtttatcgcgtgatgacatggcagaactccaaaccatagcatctgaagcactgggcatggaacgtggtgtttcttctgatcgcaaacacttatcggctatgcagtacaagaccgaatgtgcgaaagaacagcttcaggaactatccaacgatatatccagtgcgttagacaagcacaaggacgtgcaaaaccagcttcttcagcttcagaaagaactacgttccattgaaacaaagaaaaacgtccaaaaactcatttctaaggcttcagagaagttttacggcttgatagggaaaacggttaacgatagggaaaaagatgccttaaaagccaaaataaaggctttagagggggaaaatgaacagctatccgatagactgggaaaggctatacttgaaaaagagcgaaacggcacaaaggtattcaaagccgagaacgacaaggagtattatagacagcaaatggacaatgcaaggacaaccagtaaccgactaagaacggagaaccaagaactaaagaccgaaaccaaggaattgaaaaaagaacttggtaagatgaaagacttgttcaattccgaacaactggaggctttaaggcatcatttcccaaacatatcaaaagctatggaagaggggaaagacctactcaagcaaatcaccagaagcagaggtttcggcatgggtatgtaaccccccccgcccccaaagggggagcgaccaaacggcagcttcactcaatggagtgttacgccgttcgggttcggaagaaattttgcagggttcgaaaaacggttgtgtgcttattcgaaaaaaagtttatggtgtgggcgctcgtcgggacgggtggtcccgccccttgccgctgggcgctccccgaccgatgattttttaagtagttgattatatgccgtttttagggtataataagaacttaagaaatagaataagttaagtagttgatactcaatatagggtattttccatattggaaaatctgattttccatattagaaagtcactctttcctattagatgttaaaaaggaaaatatattttgcttttttattgtattaatggaaatttaaatattcctttgtggaaaatcaaattatactttttcaccgatatatagaaagtcaaatttgcctaaatagaatgtttatggaaaataagaaagtactcaaattaaccgattttcaaaaaaacgaagaaaacccctttatgaaacaagcaattgaaggaattgaaaatcacgttgttaagaaatacaaaagtagtacgggaagtgataaaaaagctgtagttgctgttgctgatacagatacaggagaagtattcaaaacctcgtttatccgacaaatagaagtagatgaagagcaatttgcaaaactataccttgcgaattttgccgcttttttcaatctatcacaatcagctattcgggttttcgggtatattctaacttgcatgaagcctaagaatgatatgataattttcgataggcgaaaatgcttagaatacacccaatacaaatcagacaaagccatatacaaaggattggcagagctcgtacaaagtgaaatcatagcaagaggtccaaacgaatataattggttcattaatccgttgattgtctttaatggggatagggtttcatttacaa

SEQ ID NO: 107 - DNA, 1590 bp, Bacteroides uniformis
  source 1..1590: mol_type = genomic DNA
tccttctcctcgcacgggataccgtatttttcctcaaagtactgaggctttaccttgtagtgttgcagtaccatttcctcgtaagctttctgctgttcgggcgtgtagtcaatggagtagtcccaatcgaagcgcagccctttaacagggaacccgtggcgcaccatgcgcggaatgagctggttgttcactatatcccgaagcatatcacagtcgctttccacgaggttctggaacacttcaaggtgcgtttccgactgtgataggctgcttccgtcctcgatggtcatcgtctgcccgatgataagctttgacagttcggagttggcccgatcgatacgcttgtcatagacattgaatgcgtcccccttgccgctttccacaaattcgatttcggtttccattcctgccaccatggagagggcggttccggcttcacgcaacatcttgtcgagacggtcaatctctttctgatcgcgcgaagtggtgcgtgctatacgcatgggcattccgaatatttccccgaaggtgtcccaaaaggccagcatgttctttttgggaatagtctgtgaagcagccttgagatacagcccgaggtcgtcgggcctacctgcctcaatgagccagtcggaaaaaggaggctggcggtagtctatacctgtagtccagtcctgcccgaggtcggtaatgacacgcccatactcaggaatgacatgtttgcgcggaataagcttcacatccgaataacagatgcagccgtcgccgtcagtgcaaaggtcgcccaattcgatgagcgaatgtccccagtagattgaatcaagtgcatagcgcatgagctgcttgaaccaggactggtcaaagaagtgaaccgcttcctcgttctcatcccctttcatatccacgattttgaaagaacgtgccatgacaaaacctctgcgctgctccacacacccggagaggtgaaggtctatttccgcgtcccggtagatgtcgtacaggcgctggcggctgggactgtccacattgatggcatactgccaggcatcgcgccagttcttgatgtccttccgggtgagtgcatcggtggtgcgttgcaggtcgatgaccattttctgcacccgcttgatgtctttccccttggccagattaaaattgccgtatggcgtttgcagtacgtttttcggtttattggaaaacataccgctgaaaaagtctttaatatccataatcctaccagttatgatgaagctgcttctgacagctgtaaacaaatgaatttccggacggaagcccatcttctccgacagccaaaggcaaatcagggacaatttttccggcctgtacgccttcaagccacttgatggcccgttcataccgttccttgcgtatctcgcttcccatcttttgcggcatggctgcactcatgtggtaaagtgaaatgtcgcaggtgtacatgacaatgaggcggttccgatgttcatcctgtgcagagaaaatggccgtacagtcgtatttcggccgtagataaccggcaatttcttcccgggcttccgcttctgcattggtacggttttccgggcttacctgcga

SEQ ID NO: 108 - DNA, 1453 bp, Bacteroides uniformis
  source 1..1453: mol_type = genomic DNA
cttggtgatacggctctgacggtagcctttttccgggaaatacttccggctctccagcttcacccgtctgcccacaaacaggtctatgccgtgctcctcgatgtataccgggtctgtcggggctttgtaggcggcaatgtccagccagtggtcccggttgtactcgtccaccgcaaccgcaaactcctcttcggccagccggtaatactcatccggcatccggatattccacaggatataggtgtcgcctgctcggggcaccagcttgccgcccggcagctgggtgtcgtcatcgtagggccagatggtgatcagttcgaattcacgtgccgcgctgtcgtagttcacctcaaagtagtggtcatcgctttctcccagtccggcaaggtcgcccgtctggaacgacacacgtttggtttctccggccagctcgtacaggttagggtcaaagtccagttccccgtcccggaaataatagacggtgaatttgtttccttcatcgtctgccacctcctcgctgcgaaccgagctcaccgtaccgacccgacgggggaagatgccgctgaaagcatcctgctcgtaatggtcatagatgccatattcctccacgccctgctcgatgtacttcctgccgccgggaagcatcagacgcgggctgccgtatttctccgcatcgatgttgcgggtcgagcctaccgggaacaggcgcgtatagaatttggccgtgttgctcgtatctctttccagggaggtcagccccttgccatagccaagggtgatttcttccccgtgttcgcagcggcacacgttcacagtctgcccctcaacccaccattccaccttgccgcctgccttttccgcgatggctttcagcgcttcgtcgcagtacatcccctcgtagtctatcgtgatcagctccgtaccttccaccgtacccgtcttccagtcagtaatgtggcccatgccgttattgatagccttcaccaccatcgccacatgctcgcggggcgtggccgtcagggtaaacagggggttggtgtccccgtccgtcgtctccagcaccaggaaccgcttgattaggctctcgataccgtacagcttcaggttatactcccattcaccatcgctcacctgcttcggcgtgtagcgttctgtcagccagtaccgttcgcccagatagtccgtgtagtcgttcacgtccaggggcaggaaggcataatagctgaacgacagggaaagcacattgtctccctgcacttccttgctttgcgtcgagctgtcgttcacggccacatccgcacgcttggttccggctttatcatatatcgttagaagcatattctaatagcgtttgaatggttatataatcggtttcggttcccggaactttacccggaactttccggcatgcacaccttccgtccacagataggtcagcggggtgaacttcgta

SEQ ID NO: 109 - DNA, 1329 bp, Bacteroides uniformis
  source 1..1329: mol_type = genomic DNA
tccgtcaaccgtgtcccgggaggcacttttcacctccccggcaagcgccttcatttcagaggtggcgttcaggtattcttcgtcagctgaaacgctggacgattgagccgtttgaagagcaatttgggtacgttctatttctgcctggttaccgctttcaagagccttgttgtaatcggcctgcgccgctttcaaccggatgaatgccgcttcctgctgcagttctgcattttgcacacgtgttacggcatcccccaaagcgtgcatctgcgtttgcagccgggcaaaatccaatgtgccgttgccaccggggagcatgctttgaatacgttcaatggcatcgtaaacgacctgctgatccgctgctcctgattttttgaactcatccgtcttgacatactgcttaagttcgccaagcagattcttcatctggtctgcaagcaagccggttaaatccccgaacgctgctccccagtctatcttctgggtaagggattccatgtccactttgtgcacagccgcatcacgctgcttttccaaagtcagtctttcgccctgggactgtgccttgcggattttctcggcatattcttcagcgatggccagtttctgctgctggaaggtcccgtattccttcagatagtcacgcatggcttccgcctcttccctgtacacgtccgcctccgcttttttccttgactcggtgtttgaggcacgggctttttcaagttcatcctgttgctcccgggtaagtccgttatctccggtagaaagaccggcttccttgttctcacgcttccagtcggcttcctgccggtttatctcttctttccgggcgttatagtcatattcgatttgtgccagtttcttctcggtaccggcttgcatgcggtctatctcttccttccggttttcagcctgcagggcggcaagatcctgcgccagcctacgctctgtggcaagccgttgcttggcttccgcttccggattcttcccggactgcttggggtcgatatgcccaccgatatttccttttttggctgcttctgcggctttctttacctcttcctccgcttttttcagataaccgtcacgtttgttttcggcatttttcaacagtacgtcataagcttcctgatcatgtttcttgatggcagcctgtgcgtcatagaactgcccggattctgccatgcttgactgcatgatatattgtccccatttcccgaaaaaacccatggcgctttccgcctcttccggtttctgcgccttgattttattcacctcttcatcggcttctgcagctttttttacaaggttctggacattggt

SEQ ID NO: 110 - DNA, 1279 bp, Bacteroides uniformis
  source 1..1279: mol_type = genomic DNA
ttcgcccaggtgtccggcgctcacaccggtgttctcggctatccgggccagatgcccttcagccgtgtccatcttctccaccacgctttccagccggtcgtccatgctgctccagtgctgcagcccgccggtgaacatgccctccagtttcgtgccctggtcctgcgtcatggccgtaaagccgcccgctttcgcactttggctcgtaccgccctgctgcgtcttgtcataaccggtggctgccgccaggttgtcacgcagggcaagggcttcatccatatactgcatgtactcttccatcagcgcgttccgttccgcctcggtcagttcgttgtcctccatggccttgccaaacttctcccaccagcctttcagtttgtcgctgtacatctcaccgatcttgttgctcagcatcgcccgcatgaagtactcggatatatcctccgccgcatccttggcaccgtacttcatgttcatcaggttgtcgatgaagctgctgtacataccgtcgaacgaaatgcccgtcagcccttcatacagctggtcggtcagttcctccagcttgccggcctggtctatgtagtcatccagtttctcggtcagtcgcccgccatagcctcccttaccggtattctggatttgcgtccacatatccacgttgctgcgcagtgccttcatttcctccgggctcaggctccacaggttcccgtcccactggcggccgatctgtccgctcagtttgtctatctgtgcctggttgaaaccgccccagtagtagttccagctgtggtgacttccgtggtagccggcttgcgccatagccatctgcaggtagttcgaattcgtttcctgctgcatcttgtacgcgtcgcggtaagccgccacactcttcgtcccctggctctgcttgatggtgtcggtcagatcctctatcgaggtctgcagcagctcgttccggtctgtaagacggtctatagccgcctgcacttccttggcgttcccgccgatgccgaacagtttgttgaaacctccgaaagacaccgtgttcagcaatcccccgatacctttcacaagggaaccgcctatctgtttgaacaggtctccgctgaggatattgtcgagtattccggttatcgcattgaaaatggtgtctatcaatgatgagataatcgggccaataccgtctttcagcaaatccagtatggagagaatggccgatatgatctgcccgatgactccggcacttgacagggtttcggacatccggctgatggcatcg

SEQ ID NO: 111 - DNA, 1248 bp, Bacteroides uniformis
  source 1..1248: mol_type = genomic DNA
aagttgccgttggccgttaccagtccctccagctgtatatggtcggctgtcagcttgattttgctcacggtatttccgtactcgtcctcttcctccacgctcaccccgataagggcaatctttcctgtattgtcctgcgcatacagaccggaaccttcaggctttatgacaagcccggtctctttcagcgcattaccgtccttgtcgaagaccgccgctgaaatctttaccagccggtcgctctgttcgaacagtgtacggtacttataggccagtgcgtccgccttgttggtgctgaacaccagcagcgaaatgtaaatcacgcccgtaaacgacagcttgaagtcgccagtgccgttccaaagtccgtccaacgtgaacatcttctcaccgccaacgggcaggtcctcttcatggccgaacatgttgaagttctcaaacccggtcttatcagcgttcacaaattctattttcaaccttccggccttgataacccggtagctgaacgacagatacaccacgccgggcacccgttcgccctggctgttcgtctgccggtactccggtaccagccggaagtcctccagtttctgcatgatatagctgttccggatataggcataaggcaccttgccgtcggtccgtatctcggcatggccgtccggcttcgtaccgtaaggaccgccgttcgcccagatccagcgtccgcccagggtgaacagcgtagccttgctgcccgtcttccatttgtccatgccgtcggcaaaactgctgttgtccagataactctgttcttcgcgtatttccttgcgcaagctttccacggctgaatggattttcccctcggttatctcaaaccgcgtcaggatgtcctcgcccgtcatcaacacgaacgtacccttcagccacacgttgtcggcatacaggccgtttcctttcggctgtttgtctgccgggaaagcgctgctcctgatgccgtccagcttacccagccggcaacgaaggcagccgttgaagttcttggccttcacaccgtccagaatgtcgatacggggctgtccgtcctccgtggccgcaatggatataaggttctgccggagcggggtttcggtgttgcccatcagcacgcactcatcgcctgcctccggcttcaccccgccaaactcgcttaccgggaccagtacaccgccggctatcaccgaagccacctccacccagtatgcttttagtttcttaccacccgtaacc

SEQ ID NO: 112 - DNA, 1206 bp, Bacteroides uniformis
  source 1..1206: mol_type = genomic DNA
aagatactggaagacggcagcattgaaacgaccaacggtaagtttaccggagagatagacagcagcaaagggaaaatcggcggctttgagatagggaacggccgtatcggttctgtggccgactctcacgggagcggtggcggtcttgccatttatgatgattttttccgtgtcggcggcagcaaaggatatgtgatgttcggtgatgatgtgataccgtcttctgcaggaggagcttttaccgctgtcggtcgtatcgtgaactcagcccccaatatatacgggaattacggcttcgaccaagcgaactatggattgtttatagatgttaccggcggtacgaagaactacggtatcagcagcaatgcggcattacttgccccggcgtttatcaatacgaaagccaagctgcttaccttcggaagtggaaactacacggtggatttctcacaacacaatatcattttgatgtattacaatgaacccaactacagtaaggtagaggttacgctgccgtcggaaagttctgtggcatacaagttcggcatgagttacttgcctaccgattttgcagccattgtcacgttcagggtcagacccggttcaaagaatatcatactaaaaggtatctataaccacaatgaagatttgcaaaactacgagatggcatccggggactccgtaacggtacttattacaaaagcggacggattccgttaccagatattgaatcattcatcctaaaaaacagatatatatgaaaaagttagatttcaggaatttcagcgttcccaccggaataacccgtcagacgagggaggttttcgatgcacgtgagcagatagccgatttgctgtatacgcgtgtcagtggcatcaaggcccatcggcttgcgttcaagattttcgagagtaccggcgagaccgagttcagcgatgaggaaaccgggatgatacacatggcggtggaacgctattgtcttcccaatgtgatagatgccctgaacgaaatcctgggcgggtcagaaaccgataaaaacgaatgagtatggcagaaatgacacaagaagaactggttcaggaagtgctggaccgtgtactccagagttctaccggcgtggaggacttggagaccgtcacctcgctgagcggtgtgaaatcactgcccggggagaaggacggcaagatggtgaacgtccccctggaa

SEQ ID NO: 113 - DNA, 968 bp, Bacteroides uniformis
  source 1..968: mol_type = genomic DNA
gccccgcaaagtacttcaatactccgtgaaggggtttatacggaaatctggacaggggaacttgttaaggtgctccgtgccggactggaaggaacctggctgtcaggaatccccgaccaaagcagtatcgtgaataacgatgtgattcacctggtagaagttggtgtagatccggatgtcttgataaacaataaaacctatccgattgatgtgcaggctttggaagacaaggatattgccatcaagctggacaaattccagaccaaggctacgccgattacagacgatgagctttatgccatcagctatgacaagaccgcccgtgtgaaagagggacatgccaacagtatcaatgatgcgaagtttaccaaggcggcccatgcgctttgtgcgaacaaaaatacggaaactactccggtgcttaagactaccggcgagaaagatccggctacaaaccgtctgcgccttaccgtgaatgaccttgtggaaatgaagcgtgcccttgacaacctgcgcgtaccgtcagacggccgcagactggtgctttgccccgaccatgtgaatgacctgctgctgaccagccaggcattccgtgaacagtacaatattgaccgcaacagcggcaaggtaggtaacctttacggctttgaaatctacgagtatggcaacaacccgctttatactacagccggagtgaagaaggcattgggtacaacggcagaagccggtgaatttccgtgttcatttgccttctacaaacagagggttttcaaggcaacaggttctaccaagatgtattattccgagtcaaagaatgacccgttgaaccagcgtaacctgattaacttccgccattacttcatctgcatgcccaagaaagaggatgccggagtggtaatgatgagcggctatcaagcatgatgattatggcaaagttgaaatatctggtaatacactgtacggcaacc

SEQ ID NO: 114 - DNA, 862 bp, Bacteroides uniformis
  source 1..862: mol_type = genomic DNA
ttcaaacgacagcctgaacagctacggaagccgtgtgttgacatcgggcatgagtgtggagcagtattgccgaaacccggtactgctgtacatgcaccaacgcggaaacgtgattggttatgtgaaggaccttcgggtagaggatggtgaagtaaccggggaactggtgtttgacgaagcgaccgacctcagtaaaagatgcaagaaacagtttgaattcggcagtctgagaatggtgagtgccggaatagacattctggaactgagtgaccagcccgaacatttgctgcaggggcagaccagcccgacaataaccaaaagcaagctgtatgaggtatcactggtggatgtaggttccaatgatgatgccatcgtactgatgaaggatggaaaacaaatcacattgggaaaggatggtgattgtcctttgccactaatcaataaccaaaaaacaacagaagaaatggaactgaaacttttggcccttcaattggggctgccggaaacggcaacggaggctgatgttaatcaagccttaaatgaactgaaagcagccaaggcagagaatgattccctgaagcaagaaaacgggaagctgactttggcccgtatcactggtcttgtagaaaaggcagtggtggaaaagcgtctgggagaagacaagaagatacagtttatcgaacttggcaagaaggttggtgtcgatgaactgaagaatgtgcttgatgccatgcaaccacaggtgaagatttccactgtattgagctatcagggcggcaagcagcaggcacagccgtccacctatgccaaactgagcgatgtcccgagtgatgcgctgcttgaaatgcgcgagcataacccg

SEQ ID NO: 115 - DNA, 824 bp, Bacteroides uniformis
  source 1..824: mol_type = genomic DNA
cgccttttcctgttccttgctgccggtgaagttctttatttcatcgatgaccgatttcagttcgaagcgggtacgcaccatctgggcacggccgtccttctctatctcggtcatttccttgagtgatatgttgaattcatccacgccttttttggcactgaacaggtttttcgtccaatcccagatttcatcaccgtacattaccagcagcatgatgccggtggtcatggccgtctgccaggaaaaaagtgaggacaggacctgcttccataccggtgtgcccttcttgccggacttctgcagctcatcgtattccttgcgggcacgggccagttcgtccgtaaaaatcggcaggttgttgctgattgccaggaagaacatctgcggtcccatggccaaagaaggcatttcacgggcgatctgctggatactgttgtgaagcccgcccaactggcgctgcgcgttgggtacatctgcaggggtgacctgcacggattccgattcctcctgcagcagtttcagtttgccgcgcaattcctcaagctgcttctccagtgcatggatctgcgcgatattggcactctggtccagattgggggcagccgtctccccggcaaggcgcagcctttccagttcagcctccagcagcctgacggtattacgcagttccagcgcctcacgctcggccttgttcatgccgggcgtgagtttgtccttcatcaaaaattcaacttctacaggtttgctcattccagtttgctttgaaaaaatcctactatatcgttcgcttcatcctcggcgctgtgttccggtctgggagcacc

SEQ ID NO: 116 - DNA, 469 bp, Bacteroides uniformis
  source 1..469: mol_type = genomic DNA
tcgcaaaccacgtggagactgtccgcgtccgcaagccaggaatttcaccccgttggccgccttgaactccccatcctgccaggaggcattcccctgctgcttgccgaagtcggcaatgatgcgctggttatgttccagttctgcctgaatatctcccagcagacgtgtggctgagtcctcacttttgccgaccaccaccatgaagttgatgagacgtttgggctggaacatcagccacagcggaacaaaaatgtccatgtgtgtggacttggcatggccacgcggccacatgaataccgctttcaggttgggtgtgccttttactttagccgctgccgcattgtggaacggtgcattgtggatggtgcgtatgacttccccggtggttttgtcacgcaaggtgagaaagtgggggaagtaatattcacagaacgcggcatagttaccctgcagacgcagaatacgcctg

SEQ ID NO: 117 - DNA, 455 bp, Bacteroides uniformis
  source 1..455: mol_type = genomic DNA
acggtggcgaagctggacggcagcgagggagactggatgatgtatgagccgttttactggagcaaaggcatcaacgattatttgaacaacaagaagtacgcctgctacagcagttatccggaggacgaaatgcccccggtgcctgaggcgacggtactgacactggatgccatcaaggagacacagggcggctggctgggtgaacgcaagatcatgagcggcaagcccacgctgatggaatcctatacgacggacaaggcttattccgtgtgcaaagtggacgtgtcgggttacagacgtgtccgcttcccgagcgttccaggaacagggcttatcggcagtgtgtttgctgatgcggagggaaacatcctgaagagtattgtggtgccgaccatcggcttgaaatttgaagccggcatgtatctgatagcagacgttccggaacgtgctacagc

SEQ ID NO: 118 - DNA, 450 bp, Bacteroides uniformis
  source 1..450: mol_type = genomic DNA
agcggacaccaccagctggccgcacacgctgcgcaccttctcgatcagcagttccagcgccaccaggctttgccgggcagtcactttgtccaccgtcaggtttgtcagtccggtcagctggtcaatccacagctgccagccctcaccggtcagcccgtccacaaactccgtgctgcgcagcagttcgcggatcacggcagtcaagtattcggcattgccctcaccatccacgatgccgcagggcttgccgccagcagcctcgccaaagctcacacccttcaggaagcggatggactctttggctgtgtccggctggttcttgctcaggaactctttctggctgcgccgggcggaaaacaggttgttgtccgtgggcagcgtcttgtcccagcttcgtatgatgtccggaagggcagcgccttccgtctttgatttcgtatagcttttcag

SEQ ID NO: 119 - DNA, 427 bp, Bacteroides uniformis
  source 1..427: mol_type = genomic DNA
actgagccacagcgacaagatagaggacatggaaccggattgggtggccaatgaggagcatctgtgtgccgttgtgggcagttcggtggtgggcagtaaactgcgtgcctgcatcaccggagcttcgaccacggcaagcatgacctggacggacttccactactacagccagcagcggggtatgcagcagatagatgcgctgatgcacagccgcatcgcgaacctgagctatgcaaagtacgggcgcagggatatgcaggaacaatgcggtgccggtcagcataacaataaccgcacaacaggcggaacggccgaacacgggatgacagacaccatcggctacgatgaagcgtatgtcattaacaacaaaatcacgaattcgctgattgacggcctggtgcaccagtatgcctggtataagagtcgg

SEQ ID NO: 120 - DNA, 423 bp, Bacteroides uniformis
  source 1..423: mol_type = genomic DNA
cagtcggcatacttcacccgcagctgcagatccagctgggggaaacggatctccagccagccgtccttcccttgcttcaggaaattcacaaaggcaaagtactgcttcatccagcctgcctgggtcttgttgtaaagcgcaaaatgcagcgtcacgtcacgcgcttcattccgtggggtcagcacggggctgtatttttccccgtgctcttcccgtatgtccacagccgtatccttcttggccttgctcggggtcaggatggccgtcaggttctccatgcccccgcgccggtcttccaccaggaacacgccgtattccgtccagatgtccgtgccgttcaccagcaccagtccgctcagtatattgcccatatcacttcacttttagtccgtcacgtatcattttctttatcacttccttcag

SEQ ID NO: 121 - DNA, 412 bp, Bacteroides uniformis
  source 1..412: mol_type = genomic DNA
gcaggataccgtttcaggaatggtacggtggctttacgacctctacgagcgtacacgtgatacggcagccgtccagttctttatggaagcgaacttcatgcaggatgtcattctggatgagtttgaggcagaagggaatctgcgtggataccaactgcccatcatgccggacaaacgaaagaaaccggacaagctccagcgcatcgaagcggtgtcaccattatgggaacgcggtttcgtattctacaatgagaagttgaaagaatcgccggatatgcagaccggaatcgaacagaccttggcactggagcgtggcagccgtattcacgatgatgcaccggatgccgacgagggagccatctggatgctgcagcgcaattcaaggcaggagagttttcaaccggtgttcggt

SEQ ID NO: 122 - DNA, 357 bp, Bacteroides uniformis
  source 1..357: mol_type = genomic DNA
gactccgaagcctgcctttaaccctatattctttattatatgacaaaggcagaaatcgaaaagaaaaaatctcttgcacgctcactgttcctttccggcatggaacagactgaaattgcggagaaagtggacgtgtcacgcgtcaccatctcaaaatggtgcacggctgacggatggaaagaggcaagggcggcaaagaacgtcacccggccggaactggtgaacaaactcctgctcaccattgatacactcattactcaagtcaacgaatcgaacgaccctgcacttgtagctggtctcggggacaaactggccaaactttcggcggtgattgaaaagttagacaagaaggccaac

SEQ ID NO: 123 - DNA, 356 bp, Bacteroides uniformis
  source 1..356: mol_type = genomic DNA
ccgtccacgatggggttgtgcatcatctccttttcccatgcccggtagcctacgaaatccctgtattcctgcgcctcttctttcgtccatttttcgcgccataccggttctccgttcttgtctattgccttgatgacggatacatgtaccccttttgtcttggtgagattggccagcaccgagtttttagaaatgaggttcccgaccatgataaaacgcccccggcccacatccagtgcaccaaaaagggcttctttcacccagtctgtaatgtcatgcacccgtttctcattgcggcacagttcgtcgtcatccaagtcatcgatgacgatgtagtccggacgtgcttcccggtc

SEQ ID NO: 124 - DNA, 322 bp, Bacteroides uniformis
  source 1..322: mol_type = genomic DNA
cgaccattggctccttgcgggctactgtgagaaaagcgaaagcggaagcgatgaaggccgaggccggtgcagaggccatgcgcatagataacgccgaacatgccacccgcattttgatggaaaatattgtaaaacctctaaaagatgaattttgtgaaacaaagaaagaactggcccgcaatacgcgcgagatggcccgtcttagaaaagctattgatacagccggaaactgtcctcatcgtgacgattgccctgtgcttgacaggttgcgcgagtcaccgaaagagcatgaaccgggaagtccggacggaatcggcaagcg

SEQ ID NO: 125 - DNA, 279 bp, Bacteroides uniformis
  source 1..279: mol_type = genomic DNA
gctcggacaggctttcgctgccagttcgttgtgtcctataatgcgtacatcagggaatttccgatgaaaatccttcacatacttctccagtgcctttttctggcagccagtgcgggtgtctttcggggtcttaccgtctttttccacgcctccggcatacacgatgtgacggcttacactgttatatcctttggctccgttggtcacttcccaagggtccacctgtgcatcctcattgttttctaccagacgttccacgcctccgttcaggtggaacag

SEQ ID NO: 126 - DNA, 261 bp, Bacteroides uniformis
  source 1..261: mol_type = genomic DNA
tcttctttcttataatgcaggctgccgccaagcagtttgtgcaggttcgaatagttcatctggatcacattgaacgtcggggcgatgccgccgttactctgtgggatgaccagcaccggggcaccctgcacctgttcggcctcgatcttcgcggcctcgggtttcttgccgcccaggtcaaacgagttcttttcaatatacccgattgtgaaatccttatactttacggctcctatgccgtacatgaaattcttgttcatc

SEQ ID NO: 127 - DNA, 256 bp, Bacteroides uniformis
  source 1..256: mol_type = genomic DNA
acggctcacagccttaccatgttccgctacaaaggccagttcctcgaccttgtcctttgcttgccacccgggcgcaacgcccatcttcaggtattccctcgccagcagaatctgaccccacagcctcggacgcttcatcgtcacacgcacctccaccgggcgtttcagccacggaagcttccaccttttaagaggaacggacacgccgctgtccagcagcgcatccgcacactccatctctatcagttgttccagc

SEQ ID NO: 128 - DNA, 245 bp, Bacteroides uniformis
  source 1..245: mol_type = genomic DNA
tcgttcatatcctccgcatcggcatagaagttcgagctttcgtcatgcagggggaaataggtcatctccccgtccgggttgttcacttccacctgctgcccggctatctccaccttccggctcgtgggcatcttcgtcaccttggccaatacgcggtggcgcttggacaggatggcattcacatgcccgctcattttgtacgtattgccgaatttgtaccccgtcttgttgtccaggttcgaaac

SEQ ID NO: 129 - DNA, 241 bp, Bacteroides uniformis
  source 1..241: mol_type = genomic DNA
ccgacagcgcgagcggaagccgacgggcgggactggtgatggcgggtataccggcgagttcggtgaagctgtctatacctgcggacagcctccgtaaacttcctgaaggtgccgtgtaccgtggcaagagcggacaggcgaatctgaccgtaggcagcgacgacagcgggaacatcgtggccgaagcctcgtgtgacagtctgcagcagctggtgctatggtatgaagaagagctggcgcg

SEQ ID NO: 130 - DNA, 212 bp, Bacteroides uniformis
  source 1..212: mol_type = genomic DNA
cggtcagccatacgttagccctcctcactttggagcgatgctgcagccgcggcttccgccggcggcagcttgtactgcccccactcgtccggtattgcttccgtatcgaacacgccgtaaggctgcgaaccgtcctccggcatcgccacttcgagcgtaacctctatcttggaggtttctgtaagggtcagcttgcctgcaggattggaaag

SEQ ID NO: 131 - DNA, 209 bp, Bacteroides uniformis
  source 1..209: mol_type = genomic DNA
gaggagtacaagcgcctgtacaaggctgaatacggcatgacctgtgaaatttgaaaacctttaaaatgaagaaaatgggaaaaattgtaatgcttttgacggcacttctgttcaatacgctgacaggtgtcgtgtgtgcttcggtattgggattctctccggtggccggagctgtgggaatgaatgcggtggcagcctttatgggaatg

SEQ ID NO: 132 - DNA, 187 bp, Bacteroides uniformis
  source 1..187: mol_type = genomic DNA
attcttacacgtttactcattttctcatgccacgcctttatgcattggcgctgcaatattacagagcacttaccgggaagccaaaaaagtgtgcaatggttgcacacttctatgaaaccgttgcacattattttggctgcaagctgataagcggacaactttgcgaataaatcgggcaggtgcaagg

SEQ ID NO: 133 - DNA, 155 bp, Bacteroides uniformis
  source 1..155: mol_type = genomic DNA
tccttttgtgccggtgtctcgcccgcgagcaaagccgtatccgtgatggactgcactcttttacagtgttccttccactgttcgtatgcctgtttcttttccgctgctgttgccatagccgttttattttatgcccatctgttcggtgatataca

SEQ ID NO: 134 - DNA, 152 bp, Bacteroides uniformis
  source 1..152: mol_type = genomic DNA
tttccgccgccttgctttttccgcacataccgcggcgcgtcgctcagcatcatgatcagcgtctggtaattcaccccatcaaggatgtaatccacgctccagccggtcgccgatgcaatctgccacacgaagccgaaagggctatgggaacc

SEQ ID NO: 135 - DNA, 143 bp, Bacteroides uniformis
  source 1..143: mol_type = genomic DNA
tatccgtagcgaaaccaagagcgaaatttcaaatgacgttcaaacggtagaaaaacgccctccgaaccggatgcggacgtttatcacaggtgtattggccggcttgcttgtcggtatgttattaacaatgaaactgaaaaaaa

SEQ ID NO: 136 - DNA, 128 bp, Bacteroides uniformis
  source 1..128: mol_type = genomic DNA
tccaagtatgaaatgctggtctgctataccgacccctctttcaaatcgaccacttccaacgactacaaggcttgccgcctttggggcaagattgggaaggaactgcaccttatagactgttacgtccg

SEQ ID NO: 137 - DNA, 122 bp, Bacteroides uniformis
  source 1..122: mol_type = genomic DNA
aacattcgagcgtctgatgggcacgaaggattttatgcgtattatcagctcgacagcgcgggcgaacccgatgactccgagactgagccaggcaaggaaggggagttaagaacccggtatga

SEQ ID NO: 138 - DNA, 120 bp, Bacteroides uniformis
  source 1..120: mol_type = genomic DNA
ctggtgcagcagaacctgtacatagtcctcgctcttttggataagggtatcataccattcggaaagtgttttataatacccgaaagattccccgtacttgcggttcagttcctccacctt

SEQ ID NO: 139 - DNA, 119 bp, Bacteroides uniformis
  source 1..119: mol_type = genomic DNA
ccgctgtcgttcggcagatccacgccgtccatcatgtcatacttgttgccgtagatgtcctcatagcccaggcagcagatattgttcacctgcaccacagtcgcctgtccgtattcgtc

SEQ ID NO: 140 - DNA, 119 bp, Bacteroides uniformis
  source 1..119: mol_type = genomic DNA
ccgaccttgcctccgatattcagttttgaaagaccggtaagcatgttctggattccttcaaatgatccctgcaaggttccgctcgcaaagccgtgcaacccgttggataccatgttcaa

SEQ ID NO: 141 - DNA, 118 bp, Bacteroides uniformis
  source 1..118: mol_type = genomic DNA
tagcgtggcgttgggaatcagtacgctctgtccggacacgagggagagttcccatggtccctgcatgacaagcacctccgacggggctgtccaaccgatcggagttttcttttccaaa

SEQ ID NO: 142 - DNA, 117 bp, Bacteroides uniformis
  source 1..117: mol_type = genomic DNA
ccaccgtaccaaccaggccgccgccaaggataatgttcataaattcgctcaagtccataccacccggttttattattgattaatacctatttctttcaaccattcctgcacatcgaa

SEQ ID NO: 143 - DNA, 115 bp, Bacteroides uniformis
  source 1..115: mol_type = genomic DNA
atttagtgatgaacaatgccattttttctatatcccggatagtggttcccttgcggaaacggtggcggtgaatcagttcacagatgttccttttggggacaactttcagtttgcc

SEQ ID NO: 144 - DNA, 114 bp, Bacteroides uniformis
  source 1..114: mol_type = genomic DNA
atcctggtacttgttgattgccctgaccagttccggagtcacttccgggtcgatggttgaacggtattcaatccatttggagaatgccatgaacacttcaatgacatccactac

SEQ ID NO: 145 - DNA, 112 bp, Bacteroides uniformis
  source 1..112: mol_type = genomic DNA
ggaacatggccgtcagataacgccactccacaaagttccgcagtacccacgctgtcaccccgatgcccacgtgccgcgacacgtatccccggcataccgtataggccagcag

SEQ ID NO: 146 - DNA, 110 bp, Bacteroides uniformis
  source 1..110: mol_type = genomic DNA
gcttccgtggcggcctgggtcttttcctccagtccggctacggctccttccgctttcttggcggcagcctcggcacgggcggcggcatcgctcgcaggcttccctatcag

SEQ ID NO: 147 - DNA, 109 bp, Bacteroides uniformis
  source 1..109: mol_type = genomic DNA
catgtccatatacttgccgtgcgccacgcctgtaatccactgaccgctgtccttcttgccctgtaccatacggatactgccgtcaggcatccagatgcgccatttgccc

SEQ ID NO: 148 - DNA, 105 bp, Bacteroides uniformis
  source 1..105: mol_type = genomic DNA
gatgaggaactggagaagtatgccgcccgttatccggaactgaccatcaagcagccgccctatacgatgatcgagtttgacgacagcgtggccgacgatgccaat

SEQ ID NO: 149 - DNA, 102 bp, Bacteroides uniformis
  source 1..102: mol_type = genomic DNA
tacttgcaagcacgggcaacggcacgtttatagcgccatgcaaaaatcattcttttaatcagctgtatcatgttaccatatatttttggcggtcggcctttt

SEQ ID NO: 150 - DNA, 101 bp, Bacteroides uniformis
  source 1..101: mol_type = genomic DNA
gccaacggcaagatcaaggacgtggtgaagcagggcgacaactaccgcatcgtgtttgagcaggaatcgggctttgtggcccatgacctgatgcgctgtgc

SEQ ID NO: 151 - DNA, 3084713 bp, Enterococcus avium (residues 1-1,542,357 of 3,084,713)
  source 1..3084713: mol_type = genomic DNA
ttgacctcattggacaatttctggcaggaattgaaggacagttataaaaatgacctcaatcctgccagttatgatgcatgggtaggtacagctaaacccttatcattagctcataatcaattgacgatcgaagttacgagcgacttacataagcgctattgggaaaaacatctagctgcaaaaatcgtcgaaatcggctttaaagtaaccggggacgagattatgccattatttgttacaccggatgaagctccgcccgttagcattgtggaaaaagaagaaccacccaaaatggaaacaacaaaacgagcaatgctcaatcccaaatatacatttgatacctttgtaatcggaaaaggtaaccaaatggctcatgcagcagcattagtggttgctgaagaaccaggatcaatctataatccgcttttcttttatggaggagtagggttaggtaaaacccacttgatgcatgctattggacatcaaatgcttgcaataaatccgcaagcaaaagtcaaatatgtttctagtgagacattcgcaaatgactttatcaattcaattaagaataaaacctcggaggaatttcgacaggaataccgaaaagtggatttattattagtagatgatattcaattttttgctgacaaagaggcgactcaagaagagtttttccatacttttgagaatttatataatgataataagcaaatcgttctaactagtgatcgtctaccaaatgaaatacctaagttacaagaacgattagtttctcgctttgcttggggcttatcagtagatatcacaccaccagatctagaaacgcgtacagcaattttaagaaaaaaagcgcaggcagaaaatcttgaaatcccagatgatactttaagttatattgcgggacaaattgattctaatatccgtgaactagaaggagctctggttcgagtacaagctttcgctacgatgaatagcgctgatattacgactagtatcgcggcagacgcactaaaaagtttgaaaggaaccagcaattcacaactttccatcagtaaaattcaagatgaagttgctaagttctatcatatccaattaaaagatttaaaaggaaagaaacgtgtcaaaacaattgttgttccgcgacaaatcgctatgtatttagctcgagaaatgactgaaagttccttaccaaaaattggcgctgaatttggcggaaaggatcatacaacagtcatacacgcacacgaaaaaatcagtcaattaatgaaaagcgatagcaacattcaacaagaaatcgcagaaatcaaaaatctgctgttaggctagtttgtggaaaacaagacaaagaatagcttgtttgtccacagcttatccacaagtgtaaaacttattatttcaagctttgactcactttttccacatcattaacaggccctactacttttattacttaaattattaaataaataaaaaaagcttacagctgaaaaacttaagggctgatctaattgattgagattagctgattcatttttttttaagtaacaccaattaaaataaaaaggagttccattatgaaatttacgattaatcgtgcacgctttattcaagaattacaaacggttcaaagagcaatctctactaaaacaacgattccgatcttaacaggagtaaaaattgaattaaataatgaaggactgaatttaacaggtagtaatgccgatatttcaattgaaacttttttagccgctgatgatgagaaagcggaattacaaattgctgaaataggaacaattgttttacaggctcgttttttcagtgaaattattcgccgtttgccagaagcaacttttactttggaagtccaagaaaaccatcaagtgttaattacatctggagcagctcactttacggttaatggattagatgcagataattatccacatctgccagttgttgaagaacaaaatcagttgaaattacctgtccacatgttgacaaaattaattggtgaaacggttttttctgtttcacaacatgaaagtcgtccgattttgacaggggtacacttcacaatgtctaatggccaattattagcagttgctacagactctcatcgtttgagtcaacggatcgtacctgtagaaaacgcgaatactgattttgatatcgttattccaggtaaaagcttagttgaactttctcgttcattatctgatgaagaagctgaagtagaaattagtatcatggaaaatcaagttttatttaaaacgccaacgatgtatttctactctcgtttactagaaggaaactatcctgatactaatcgtttaattccaactagcttcaatacggagattaccttctccgtaccaacgttcttagcagcaatcgaacgagcttcgttactgtctcatgaaggccgtaataatattgttcgtttagcaattgccgataattcagttattctttatggaaattcaccggaaatcggtaaagtagaggaagaattggtttatgaaaaagttagtggagacccgctagaaatttcctttaaccctgattacatgaaggatgctttacgagcttttggtgatatgagtatcaagatccaatttatttcggcaattcgtccatttactttggaaccgagtgaaggagatgtctcctttattcaattaattacaccagtacgaacaaattagaaaatttagctagtttcacaagtttttagaaaaatatgaaaatattttgcaaaagatgcaatttcagtaaaaggtcttaaaatcgattttaagaccttttacttttttttgagtgaattaattaaaacagcttagaacttcttaaaacgaaaaatacaacgagttaatttgttttatcgattaaaaaggggtataatgaagaggtgtttctagcatgaaaatgagggatgaatgtgaaacaaaaaatttttttagaaacagagttcatgacgcttggccagttattgaaagagatcaatttaatctctagtggtggacaagccaagtggtttcttgcagaagaaacagtatttgtagatggcgagttggaaaaccgccgcggccgaaagctctatccgggaatgatgattgagattcctgaggtaggaactttttttatggtcaaaaataaggaagagcaagatgcagctgaataagcttgagttgagaaattatcgtaattaccaagaacttgttttggaatttcctaatcggctgaatatatttttaggagagaatgcccaagggaaaacaaatctcttagaaagcatctatgtgttggctttgactcgcagtcatcgaactagtagcgaacaagaattgatcggctgggaagatgatttttcccagataaaaggtcggatacaacgcggaacgagtgaactagaattagaattattgctgacgaaaaaaggccgaaaatctaaagtcaatcatatcgaacaaaagaaattgagtagttatatcggacagttgaatgtcatcttgtttgcaccagaggatctttctttagtaaaaggcagtccgcaaatgagacgtcgttttattgatatggaattaggacagatcaatccggtttatctttatgatttggcacaatatcagaagactttgaaacagcgcaatctttatctaaagcaattatctgagaagaagcagacagatgagatatatctcgatattttaacggaacagttagtagattttggtagtaaagttttagcaaatcgactgcgttttgttaaaaaactggagtattggtcaaatgatcttcacggtaagattaccaatcaaaaagaagctctagcaattgaatatgacgctagcctcccgctagagagtgaagatgttgaaaaaattcgttatgtttttctaaatgaactacagaaaaatcgcaagcgggaaatattcaaaggaaatacttttttaggtccccatcgagatgacttgatctttaaggttaatcagcaaaatgttcagacctatgggtcacaaggacaacaacgaacaactgcattaagcgtcaaattggcagaaattgatttgatgaaagaagaaacaggcgaatatccgattttacttttagatgacgtcatgagtgaacttgatgacaatcgtcagatccatttattagagacgatcgaaaataaggttcaaacgtttttaacaacaacaacgttgaatcatgttaagggcaaaatgacggtccatccggatattttttatgtccatcaagggcagatagaaaggaaagaaacgtagatgatagaagaggaaaagagtttactagagcgcgctcaagagtatgacgccagtcagatccaggttttagaaggattagaagctgttcgaaaacgtccagggatgtatattggctccactagcacagaaggcttgcaccaccttgtttgggaaatcgtagataattccattgatgaggctttggccggatttgcaacacatattcatgtagtagttgaagaggataacagtattactgttagtgacgatgggcgtggtattcctgtcgggattcaagctaaaacaggtcgcccagctgttgaaacagtcttcacgatcttacatgccggcggtaaattcggcggcggtggatacaaagtatctggtggtcttcatggtgtaggagcttctgttgttaacgctttgtctacaagtttagacgttcgtgttttcaaagaaggtaaaatttatttccaagattatcgtcgcggtgctgttgtagatgatctaaaagtaattggcgagactgaaaagcacgggacaacagttcattttataccagatcctgaaatatttactgaatcaacagtttttaacttcgaaaaattagcaacacgggtgcgagaattagctttcttgaatcgtggtttgaagctatcgattgaagataaacgggaagaaaaaccagtcttgcgggagtaccattacgaaggcggtattaaaagctatgtagagcatttaaatcacaataaagcagttatttttgaggagcctgtctttgtagaaggtgagcagcaggatattactgttgaagtcgcaatgcaatataccgatggatatcatacaaatattttgagttttgctaataatatccatacttacgaaggcggaacacatgagtttggtttcaaaacggccttgactcgggtgattaatgactacgcacgcaaacaaaaaatcatgaaagacaacgatgagaatctttctggtgaagatgtccgtgagggtttaacagctgttatctcgatcaaacatccagaaccgcaatttgaagggcaaaccaaaacaaaactaggaaattctgaagttcgtacggtgacagatcgtttattctcagagaatttcatgaaatttttgatggaaaatccttctgttggtcgtcgaattgttgaaaagggaatattggcggctaaagcacgtttagcagctaagcgggctcgtgaagtcactcgtcgtaaaggtgcattagaaatcagcaatttacctggtaaattggccgattgttcaagtaacgatccagaaaaatgcgaattgtttattgtcgaaggagactctgccggcggttcagcgaaacaaggacgtagtcgtgagttccaagcaattttaccaatccgcggaaaaattttgaatgtggaaaaagcttcgatggataaaattttagccaacgaagaaattcgatccttgtttactgcaatgggaactggatttggtgccgattttgacgtatcaaaggcacgttatcataaattggtcatcatgaccgatgccgatgtcgatggtgcacatattcggacgctgctgctgacgcttttctatcgctatatgcgcccaatcgtagaagcaggctatgtttatatagctcaacctcctttatacggtatcaaacaagggaaaaatattacttatattcaaccaggtaaaaatgcggaagaagaattagcccaaaaaatatctgaattacctgcgtcaccaaaaccgaatgtccaacgatataaaggtttaggggaaatggatgaccatcaattatgggaaacaacgatggatccagaaaatcgtttgatgctgcgtgtcagtgtcgatgacgcaatcgaagctgaccaagtctttgaaatgctgatgggagatcgagtagaaccacgccgcgccttcattgaagaaaatgcacattatgttaaaaacttggatatttagagaaacgatagatgtgatgaatatcagatttatttttaagaaaaataaatttagcaacacgaactaggaggatcattttggaagatcgtagagagaatatacatgacgtcaatctaaccagtgaaatgcgagaatccttcattgattatgcaatgagcgttattgtggcacgtgctttaccagatgtacgggatggtttaaaacccgttcatcgtcggattttatatggaatgaacgaattaggagtcactcccgataagccgcataaaaagtcggcacgtatcgttggggatgtaatgggtaagtatcatcctcacggtgacagtgcgatttacgaatcaatggtacggatggctcaatcattcagttaccgcaatatgttagtagatggacacggaaactttggttctgtcgatggagatggcgcggcagcgatgcgttataccgaagctcgtctaagtaaaatcgcgatggaaatgctgcgggatatcaataaagataccgttgattttcaaggaaactacgatgacagtgaacaagagcctgtggtattaccagcacgttttccgaatttattagtgaacggagcaacagggattgcagttggtatggcgacgaatatccctcctcataatttaagagaagtgacagccggaattgaattattgatggaaaatcctgaggcaacgacacaagagttaatggagtgcattccaggaccagattttccaactggcggtttagttatggggaaatcagggattcgtcgagcatatgaaacaggtaaaggttcaattacggttcgtgcgaagatcgagattgaagaacaaaagaacggcaaggaacgaattatcgttaccgaattgccgtatatggttaataaagctaaactgatcgaacgaatttctgaattgcatcgagataaacgagtagaaggcattactgatttacgtgatgagtcttctcgcgaaggaatgcgggttgtcatcgaagttcgtcgtgatgttagtgcttctgttattttgaacaatttatacaagatgacatcactgcaaacatcctttagtttcaatatgttagcaattgaaaaaggtgtaccaagaatcttgaacttgaagcaaatcttggagaattatattgagcatcaaaaaattgttattactcgtcgaacaatcttcgataagaaaaaggctgaagcacgtgctcatatcttagaaggtttacgtatcgcgttagatcatatagatgagattattgcaacgattcgtaattcggcttcagatgatgtcgctaaaacgacattaatggaacggtttgaattatctgatcgtcaagcacaagcaatcttagatatgcgtttacgccgtttaacgggcttagagcgcgagaaaattgaaaatgaataccaagagctgttaaaaacaattagcgacttagaagacattttagcgcgtcctgaacgtgtggaagaaatcattcgtacggagttagcagaaattgctgctaaatttggtgatgatcgtcgaacagaattattagtcggtgaagtattgagccttgaagatgaagatttgatcgaagaagaagatgttgtcattacactcacaaataatggttacatcaaacgtgtagcatcaactgagtttcgggcgcaacgtcgtggtggacgtggagttcaagggatggggattcacgatgatgatttcgtgaaaacattgatctcatgttcgactcacgatacattgctattctttaccaatagcggacgcgtatatcgggcgaaagggtatgaagtgcctgagtatggacggacagctaaagggataccaattatcaacctactgggaattgattcgaatgaaacgattcaagccgtaatttcggtgaatggacaagcagaagatggtcatttcttattctttgttacaaagaaaggaacggtcaaacgtacaactgttacggccttctcaaatattcgtgctaatggactgattgcgattggattgcgtgaaggtgatgaattagtaaatgtaatgtccactgaaggtgacgaaacgatcattattggtacccatgatggctattctgtaacattcaaagaagcagttgttcgtgatatgggacggacagccagcggagttcgcgggattcgtttacgagacgaggattatgtaatcggctcagctgtactgaaagaaaatcaagaagttctagttattaccgaaaaaggttatggtaagcggacgaaagcttctgaatatcctgtcaaaggtcgtgggggtaaaggaatcaagaccgctaacgtcaaagaaaaaaatggtccactggcaggactaacgacagtcactggtgatgaagacattttattgattacagataagggtgtaatcattcgtttcaacgctggcagtgtttcacaaacaggtcgtgcaactttaggagtacgattaatgaagatggaaggaaacacgaaagttgtgacgatggctatcgttgataaagaagacgaagaagtcgaagagactgagacagttgaggctgcagaaacaacagaaattactgaagaagcacaaaatgatacagaagagtaaaaaaagtttgaagactgggagcaatttcagtcttttttcgtatcttaaagtaaagaaacatttgatttttgcaggatgattatgtataatgaatatttgtgagtagtctagataaaatttagatcgctctccttgctcttaatagaattaagagccttatagtccatagggaggtgaaaatcaatgagtcaaaacacgaagtatgaaatcacatacatcattcgtccgaacattgatgaagaagcaaaaactgctttagtagaacgtttcgatacaatcttgaaagataatggagctgaaattatcgattcaaaagattgggaaaaacgccgtttcgcttacgaaatgaacggattccgtgaaggcatctaccatatcgtcaatgcaactgcgccaacaacagctagtgcagttaacgaattcgatcgtcttgcaaaaatcaatgacgatattattcgtcacatgatcgttaagattgaagaataattgtttcacgtgaaacaattgacgagaagggagctggctttactttgattaataatgttgtactagttggtcgtttaacaaaggatcctgatttacgctacaccgcaaatggtacaggtgttgccacgtttactttagctgtgaatcgtaattttacgaatcaaagcgggaatcgcgaggcagattttatcaattgtgtaatttggcggaaatcagcagaaactttagctaattatgcgcgcaaaggaactcttttaggtgtgactggccgtatccaaacaagaaattatgaaaatcagcaagggcaacgtgtctatgtgacagaagttgttgctgagaatttccaattattggaatctcgtactgcaagtgaacaacgtcaacagaacccaagttccggtgatagcttccaaggtgggggaaataattttaacaacaattataatcaatcctctcagtcagctaagaacactatgcctgacttcgatcgagattcagatccatttagtggatcctctatcgacatttcagatgatgatttaccattctaacaattgaataggagggaaacggaatggcacaacaaagaagaggtcgcaaacgtcgtaaagtagactatattgctgctaatcatatcgaatatatcgattataaagatattgaattactaaaacgtttcatcagcgaacgtggtaaaattttgcctcgtcgtgtaacaggaacaagcgctaaaaaccaacgtaaattaacgatcgctattaaacgcgcacgtattatgggcttattagcattcgtttctgaagactaaactgtcattttaaagagacttcgaacgcgaagtctcttttttgtgtttcacgtgaaacattcaggaaagtcgcttgctgaggcagattgtgataaaattacactgttagtctaatcattttgcttgttagggttttagcatagaaaagcaggatgaataggtaaaatgaattaggaggttctaaatgaaaaggaatcctagaatgaaatggtcctttttcttgttctgcatactactgattcaattagccgcaattttcgtattgccgttcagtattttatcagcggcaatcgttatattaatcgatcttttactatggttttatatgattgctttacgtaaacaaactgagattaccaatcaacagaaaattcgagatgcttctcgatatgctgaagaggcattagaatatgtatctgatgacatgcctgtagggattattacttgggatgatgacaatactttcatttggtcgaatccggcaattacagaaaagattcagcatttgacgaaagaagaccagcaagatatggtcaatgaattgctgcaacgggctgaaaaagggaagagtatttataaaatagataatattctttatcattttgatttaaacaaagagagacgcgttgtttacctaattgatatcacgaaggaatatgcgttagaaaataaggaaaagcaacaacaagctgtggttggaattctttcagtagataattatgatgatgtaattgatcgtcgagacgataaggaagtatcaaacttaaattccttcattacaacgattatttctgattggatggattcttatcggattttctataaacgagtcaatgaagagcgcttttttctatttgctcgctatgatgatttagaaaaaatgatcgagaataattttgatttgctagaacatattcgtgtttcggctgaaaagcaagacatgctgattactgtcagtatgggtatcagctatggaacagaatcattagaagtgattggtgacgaagcccaaaataatttagatattgcattggttcgtggcggcgatcaagtggtggttaaaaatgctggagaaggccaaaagccggttttctatggcggtaactctgcaagtgctgcgaagcggacacgcgtgcgttcacgagcaatgtcaacagccttgaagaatgtttttaatcaaacaggcaatgtatttgtgatgggacatcgttttccagatatggatgcgatcggttctgcgtttggcgttgcttgtttagctcgctatcatgataaaaaagttcgaatcgtcattaatgaggatgaaacaattccagatgtcgaacgctgtttgacagaaattcataaaaacggggagttggaagatttactgatttctccggatgccgccaaaagacagcgcaaagccggtgatttattagttatggtagattatcatcgtccatcgttatcaattgatcaggatctgtatgaacaatttgaaaatatcgtcattatcgatcatcatcgacgaggagaagaattcccggaaaaatcattactcacatacattgagtcttcggcatcttcggcgtcagagttagttacagagctgatccaatttgagagtaatgaacggcaaagaatgagtaagatgactgcgacactgttattagctggtattacggttgatactaagaattttgctgttcgaacaacagcccgaacgtttgatgtcgctagttatttaaagacttgtggagcggatgcttctttagtacaatatctattgagtaccgatatccaatcctatttggaaattagtaagctagtgggtgagagcgattatgtcagagaagatatcgttgtcgctactgggacggatgatcatgagtatgatagtgtaacggcagccaaaaccgcggatactttgttatcgatggtggatattaatgcggctttcgtgatcatcaaaagaactgatggcgtgattgctatcagtgctagaagttctgggacgattaatgtccaaacggtgatggaagctttaggtggcggcgggcattttacaaatgctgctactcaattatcgaatagtacgatcgctgaagcgaaagaacaattattggatgccattaataaacagttaacggaggggacagaagaatgaaagtaatttttttacaagatgttaaaggcaaggggaaaaaaggcgatatcaaggaagtcccaacaggttacgcgcaaaattatctgctaaagaataaactagcaaaggaagcgacgaaaagcagtatctctgaattgagtggacaaaagaaagcccaggataaaaaggcggccgaagtattggctgaagctaaaaaactggcggactttttagcgaaagaagagactgtggtagaaatcaaagctaagggcggcgaggacggacgcttgtttggctcaattccttcaaaacaaatcgctgaaggtttgaaaaaacaatatgatttgaaaattgataaacgcaagatcgaattggagaatccgattcggactttgggctatacgaaagttccggtaaaactccatacagaggttgagggaatcattaaagtccatgtagtggaagaataatttatttaaacggaataattacaagagagtatgagagttcttgaaattacgagaatctcttatactctttattgtatttagtgagcagattttgtaaaatagatggacgaagaggagcgtaaacagacatgagcgaaatgttacaagatcgtgttccaccccaaagtattgaagccgaacaagcgaccttaggctctatttttttggagaccgatgctttaatcacggccatggagtacatagttccagaagacttttatcgtcgcggtcatcaactgatttttcgagcaatgattcaactaaacgatcgcaatgaagcaatcgatgtagtgacggtcaaagaattactagaacaacaaaaccagctggaagatgctggcggtttaagttacttatctgaacttgctttgagcgttccgacagcggctaacgtaggctattacgctaaaatcgtggaagaaaagtccttattgcgaaatctgatccaaacggctaccaatatcgtgaccgagggttttgagcaaggagacgacgtacaaacgattttagatgctgccgagcgtaatatcatggaagtatcagaacgacgcaataagagcggttttttgaccatcagtgaggtcttgaatactgcgattgaaaatatcgaccagttagctagaaatgatgaagaaattactggtttgccaactggttatgcagcgttagataaaatgactgcgggtctgcaggcagaagagctgattattttagctgctcgtccagcggtaggtaaaacagcttttgctttgaatattgcccaaaatgttggaaccaaaactgataaatcagtcgctattttcagtttggaaatgggggcagaatccttagtgaaccggatgctgtgtgcagaaggatcaattgaagcgagtcacttacgaacagggcagctgtctgaagaagaatggcaaaacctgatcgttgcaatgggaagcctgtctcgtgcgaatatctttattgatgatactcccggaatcaaagtatctgagattcgagcaaaatgtcacaaattagccaaggaaaaaggcaatcttggtttgatcctaattgactatctgcaattgattgaaggaaccggacgagaaaatcgccaacaagaggtttctgaaatttcacgacaattgaaaaagctggcaaaagagctaaaagtaccaatcattgctttgtcacagctttctcgtggggttgaacaacggcaagacaagcgtccggtgttgagtgatatccgtgaatcaggatcaatcgagcaagatgccgatatcgttgctttcttatatcgtgatgattattacgatcgtgaaggtgaagaggaggaagaatcattagctaaccgtaacgtaatcgaagtaatcattgagaaaaaccggagtggggcacgaggaaccgtagaactgctctttattaaggaatacaataaattctcttccttgtcaccgagagaagatttctagcgcaggtcttgaacttgcgctttttttagtattcgaaatttgtattgattttctgattattgaaaaataatgttcgtgatttaccttatttttataatctttatattttaatattcgaattttcattgaagtatagcgctattcttgttacaatggttcaggattaaataaaataaaatgaggtgttcagatgtcatctgtagtagttgtagggacgcagtggggcgatgaaggtaaaggaaagatcacggattttttaagtgagaatgcggaagtcattgctcgttaccaaggtggagataatgcaggtcatacaatcaaatttgacaatgaaacatataaattacacttgattccttctgggattttctacaaagaaaaaatcagtgttatcggaaacggtgtggtcgtcaatccgaagtcattagttacggaattggcttatttacatgaacgtggggttatgacggataatttgcgtatctcagatcgcgcccatgtcatcttgccataccatatcaagttggatcaattgcaggaagatgcaaaaggtgataataaaatcggtacgaccatcaaagggattggaccagcctacatggataaagcggctcgtgttggtatacgtgtagctgatttattagataaagaaatttttgaagaacgcttgaaaatcaatttggaagaaaaaaatcgtcaatttgttaaaatgtttgatgatgaagcaatgagctttgatgatatttttgaagagtattatgaatatggtcaacaaattaaacaatatgtaacggatacatccgtaatcttaaatgatgcgttggatcaaggaaaacgtgttttatttgaaggggcacaaggtgtaatgctggatattgatcaagggacttatccatttgttacctcttccaatccggttgccggtggtgtcacgatcggtagcggtgttggaccatcgaagattgataaagtcgtaggggtatgtaaagcttatacatcacgcgttggtgatggaccttttccaacggaattatttgacgaagttggtgatcaaattcgtgaagtcggtcgcgaatatggaacaacaactggtcgtccacgtcgagttggctggtttgactctgtggttatgcgtcactcaaaacgcgtttctgggattaccaatctatctttgaattcaatcgatgtgttgagcggattggaaacagtcaagatttgtaccgcttatgagctagatggagaattaatctatcattatccagcaagcttaaaggaattgaatcgctgcaaaccagtttatgaagagctacctggctggagtgaggatattactggctgtcgtgatttagcagacttgcctgaaaatgctcggaactatgttcgtcgtgtttcagagcttgttggtgtacgaatctctactttttctgtaggaccagatcggacacaaacgaatattatggaaagtgtttgggcgcaaatctaacttattgtgagacaagcaaccaattatctagtaaaatggatttactattaagtgggtgtttggaggattttaaaatgtatcagattctgacagattcatgttgtgatttgccttatgaagtattggaagaaaacaacgttgattttatttcgatgtatgtttcaatagatggcacggaattcgcagatgatttgggtcgtaattttaagattgatgatttttatcaacgaattaaagatggagcgatgccaacgacgtcacaagttaatgttggtcgttatgtagaatttttccgcggctatgcggagaaaaatataccagttttgtatatctgcttcacatctggaatgagcggttcgtatcaaagtgcgatgcaggcagttgagctcttaaaagaagacctgccagatgcggaagtttacgtagtggattctttagctgctagtggcggtgaaggcctgatggtttatgaagcggcactgaaacaacaagcaggaatgtctttagcagacctgcatcactggttggaagaaaataagctgacctatcatcattgggtgactgtggacgatttaaatcacttacaacgtggcggacgcatctcaaagacaagtgctgcgatcggcggactgatgaatatcaagccaatcattacagtggatgttgaaggcaagctgcaaaatgttgaaaaaattcgcggacgtaaaaaagctttacagttggttgcagataaaattagcgaagcaacatcagatccagcaaatcaaacaatctttatcacgaccagcgcagatcaagaaggcgcggaagaggtgaaacgtcatctagaagaaagtattcagccaaaagaagttcgaatctttccgctagggacgactatcgccagtcatactggtcttggctgtatcgcggtcttcactcgtggtgaaaaacgaaaatagaaatcattcaaagaagaggctgtgacaaaatcaactgtcacaacctcttctttttagtgttctttttgttggctgaagtcgcggattagttcaattaattgtcctcgaatcgtagaatctaaaatttgttcccgttgtaccaatgaaatcatgaaggttggttgaggttcatcagtaatcgggatcatcaccaaatgatcatcggatgaaactgctagttcggctaaaaaaccgataccaatctgttcacgaatcatcccttttaaaatattcaaattgctattttgatagataatatgtggttcgaaatgagcttgctgagccatttttttgaaggcagtcggatggacataatgctcattcaataggacaaagggttcatccttcaattcagaaaaagacacttccttgcgtttagccaaaggatgatttgggctaacaacaatcataaaacgcttttcaatcagcagttcactggtcagttcatcatcacgaatcggctgtgttgatcctaacaaagcaagatcaatttttccacggcgcaaaagtccgtagagatcacgcgagccaccatctactagatggatgtgtcgcattaaattatttttgaaaaggtaagaagagagcttgggaaagtaaaaatttccgatgatcggtggcaacccaaaatctaaggtctcttccttcaagcgatcaatctctgtaacggcgatggttacttctttcaagatatttgaaatgtgtcgggataggattaagccagcttgggtaatgattaattgtttgtgagattgatcacgataaacgagctgcgttcctaattcatcttctagacgttttactgcataggtaatggttggttgactgacatgaaaggcattggcaacctttgtaaaatttttctcacgtactaatcgttggaaatattctaggtctttaaagttcataataatctcctcttgtgaaattagattatcatataaataaaatttatcctaagcttttgttttgactatagtttgtgggggcgtgtatcgtcctaaatgtaagcaacgatagaggcaacgaaattatataagtaaactgaggcattagtattgccataagtttcaaaattaatgaaatttactcaactgtaaggaaagtataaaattttcacatgaataaatcgctttacagcagggtatccatgtccggtttcacgaagactttcttaaccccttgatttcgaataagagaacgatgaagataatcgtttggttagcgaaaaaaatagtttaaaaggaagaaggaaaaaagatgattttctttcaatcaattcaaagtgtattgagtatcattattatgattgctttagggtatctattaaagcgtcggggctggtttgatgaaagttttggaaaaagtatttcatcactgatcacgcgagtggcactgccagcatctatttttgtatccgtgttaaagaatttaaccaaagaaagtttatttcagttatcgggtagcttaatctatccagttggagccgtcattatctcttacttcttggcctatggactagttaaaattttaaagattcgcccaggacgccgcggaatatttatgaacgctgtggtgaatgctaatacgatctttattgggttacctttgaatattgctctatttggtgaaaaagcgttgccttatttcttggtttattatgtaaccaacacagtttcaacttgggcatttggagtcttcttgatctcaaacgatgatccaactaaagtcaaaggtgaaactaaagccaaattaaactggaagaaactattgccgccgccattactaggctttatcgcagctatcatcttcttgttaataggaattcctgtgccaagctttattaatgcaacgcttggttatgttggcagtatcgttactccgctatcacttctttatattgggatcgttttgtacgatgctggtttgaagagtattcgctttgatcgtgatacagtcgtggcattactgggacgctttgttttagctcctgctgtgttgatcggtttgatcgctctcggctcaaatgcctttggcgccaatttagcaccattgttgaagcaaacgctgattgtacaatctgccactccgatgttggctgttttgccaatcttagcaaatgaagcacatggtgatgttaaatacgcaacgaacttagtaacgacaagtacaatcttgtttgtagtggtcgttccaattttaatgcagctcgttcaatttatttaatttgcttcctcaatcaaaaaagcattcgcgaattgcgaatgctcagactgtagacaaaagctgttccaaactcgtaactcgagcttagaacagctttttatctacttcgtttcgaattttaggacaaaaaaaataaaggctccttgcctttccatagccaagtggctaatttctttaaattcattgcagcaaacactagcatcgtatgcgtcgcgactttttccaagcctcgatacttggtccaacgcatcccatgcttttcttttgcatccgcaaatattcgttcaatcgtttgtttccgttttttgtaaattgatttattcagatccgttaggcgaagatgttccacttcatccatcagatctccccaaacatgtctcgtgatgactcgttgatgatttttacttttggtacattggtttagcagaggacagttcacacattcttttggattggatttgtattctcggtacccttctcgagtaaccgttgaaaaagcgagcatttgatcttgcggacaaatgtaacaatcataatactcgtcatagagaaactcgttttttgataatagcccctttttccctttaggccttgaataaggcaaacaaggtcgaaggttcaaatgagtcaaaaagtgaacaaacttaggtgtcttatacccagcatcagcgacaacacagttgatttcaggaaaaagtctcttcgattgtttgacgagctgaaaggcgacttgactgtcatgaatatttccaggagtgatgattgtgctaagaataaatccgttgtcgtcgcatgaagtatgggcagaataagcaaattgtttttctcgttcgcctttgacgtagtagccgctttccggatcagccttacttatttttctttctttcagcttcacttccttttctaagtccaaagtaaaagggcgttttccggcctctattcgttgacgattgatctcatcttctaattcatcctgataggctttcgcttcatcgtgggtcatttctttcgtaaacttatgtttattggcgttagctttgatgtgggtagaatcaagatacaaattatcctctgttacaaaacctgctttaactgcttgttctaaaatataggcaaaaatatcctcaaacaccgtcgtttctctaaatcggcggacataattctttccaaaagttgagaaatgggggattttctcctcgaaggaatagcctaaaaaccagcggtaagcgacattggtatcgacttccttaatggtttgtcgcatggaacggataccgaataaatactgaataaacaccaatttgatcagaatcactggatcgatacttgggcgacctagatcggagtaagtggcttcaacgattggataaataaattcaaaatcaagcgcagcatcaatctttcgaacgagatgatcttgaggaaccaaatcatcaatcgtgagcatcgcaaattgatttctaccgttcgtattgtttttagacatcataactatcactccttgcattcgttttcataaatctattataaaagaaaagactgtagacagcatccataaaatagactttgtctacagtctgagcattcgcgaattgcgaatgcttttttttaatacaaatggctcaattgtttttgtacttctggattttctaagaattcatcatatgttgtctctgcacgatcaaccacgccattttcggaaatcgcaataatacggttcgcgatcgtttgaatgaactggtggtcatgagaggcgaatagaagggaacctttatacgcaatcagaccttcgttcaatgctgagatggattctaagtctaagtgattggttggatcatctaagactaagacatttgattttgacagcatcaattttgatagcatacaacgaactttttcaccaccggataagacgttgacaggcttcattacttcatcaccagaaaacagcatacgacctaagaagctgcgcaaaaaggtgttatcgtcttcttctttactggcgtattgccgcagccaatcaagaatcggcatatcactgtcgaattccttagtcgtatcttttggcaagtaagcctggctggttgttacaccccaacgaaccgttcctgtatcgggttctagatcacccataataactttgaataatgtagttgttaccaagtcattttcagcgatgaaagcaactttgtcgtcacgattcaaggtaaatgagatattgtctagaatctttttgccgtcgattgttacactgacattatcgacttgcagcaagtcatttccgatttcccgttctggtttgaattgtacaaagggataacggcgtgaagaaggctgaatatcgtctaaggtgattttatccaacattttcttacgagaagtcgcttgttttgattttgacgcattagcgctgaaacgagcaataaattcttgcaattctttgatttgttcttcttttttcgcattttgctgagattgtaattttgctgctaactggcttgattctaaccagaagtcgtagtttccgacgtataacttgattttcccgaaatctaggtcggccatatgagtacacactttgttcaaaaagtggcggtcatgggaaacgacgataacagtattatcaaaattaatcaaaaattcttctaaccaattgatcgattggatatctaaaccatttgttggttcgtctagtaacagaacatctggcttaccgaaaagagattgagctaataggactttgattttttgtccagccgtcagttcgctcattttttgctgatgcaactcttctggaatgttcaatccttgtaatagaactgctgcttctggttctgcttcccagccgtccagttcggcgaattcaccttcaagttctgctgcgcggataccatcttcgtcagaaaaatcttccttcatgtaaatggcgtctttttcctgcatgacttggtataagcgttcatgccccataatgactgtttcaagaacggtatattcttcaaagtcaaaatggttctgttttaacacagccattcgttcgtttggacctaaagtaacagagccagtagaaggctggatatcgcctgctaaaatcttcagaaaggttgatttgccggcaccattggcaccaatcaacccgtaacaattgccgggagtgaatttaatatttacatcatcaaaaagtttacgatcaggaaactgtaaactaacgtcacttactgtaatcaatgattttcctcgctttatcagtattggcgcaaggcctctttgcattatatcggggaacatctgaagtttcaagtcaaccgttaagaatttacttgggatttaaaataggatagacttggctttgaagggatgtgtcagtatgatcgggataattatcgcgacccacgaccatttagcggacagcctgttgaaaacggctgaatctattttgggcgaacagagctgtgtggaaactttaaatatcgagccaggtgctacaggactgcaagaaaaaattgaggattacgccaaagacttattaactaaagtcgacgagctggtttggctggtagatatgtttgggggaacgccatttcgttatgctagttattgtgtgatggatgattcgcgccagtccttagtgacgggggtcaatttgccaatggtcctgcaggctttggtaaaccgagagttgtccgcagcagaattgacgaagcaattagaaatagaagcgaaacaaacgattcgtagaatgtaaaaaggttgggtcaaaatttatggcccaacctttttattctatttcaagagttcacgtaatgtcggcatatcatgaacttgatatttttctttgaaggcattaatttgttcgacagagaatttttcaggctctaattgtaaggcttccaccggtaatggacgttcatctttgatcttaacatcaatcacgactggacgtttgctagcttttgccgcagtaaaggccggctctaattgactatattcagtaatcgtgaagccgtcagctccaagcgcctctccgactttgccgaaatcagcgccttctaaaaagacaccgaatttttgttgctctgtatcttcttgttcagcttcgatgaaaccaaaggcatcatttgaaaagaccacattgataattggcaaattgtattttacttgtgtaatgacgtcttgcatttgcattgcaaagccgccatcaccgctgaaggtaaagacttgcttatctgggtaagtcaattgagcggcgattccgcctggaaccccatttcccatcgtagcaaaccaaccagaggttgtgaattgttgttccccattcatttccaaatgacggatcgcattcaacgtaacatttccgacatccgcaacatacacagcgtcctgttcagcaatgcgattgatttctttaaagacaggttccgcccttaacggtgtcgattcgtcattataaaagctcttacgccaagcatgccaattgcggatattttcttggttggcttttaaccacgcatccgcagggcgggctgttccgagttcgacccaacggcgaagtgctgttgcaccatcacctaatactgattgatcgacattgtggcggcggccaaatttagcagcatcaatatcaacttgaataaacttagcagatggattgaagaaattccggccaaatgggaaatcactgccgacaaagacgatcaagtcagcatcagccaacgcttcatttgctggtttagtagcgacacgagcagcaaaacctaaaaagttttcatataaatcaggtacaatccctttggctaaaacagaagctgcaacaggcattgaaaaatgttcagaaaaggctttgatggtatcgaagttgccgcgaaccccttgtccgatgtaaagaactggttgatgcgctgcttcgatcaaaggtaaagcagctttcaaatctgtttcgtcagggaaaacgacacctgttttatgattttttgccgttgcaatttctgcttcttcgatttcttcaaagccgaaatcaacagggatcgtaacaactgcgacacctttttgctgatacgctgctttgatcgcttcatcgattacgtgaggcaaactttctggtgtcatcactgtacgattataaacactgacatctgcaaacattggattttcatttaattcttggaatgcattgtaattcatagcagtagaggctacctgtcccagtaaagccaagactggaacatggtccatttgcgcgtcataaagaccgttaatcaagtgactagcaccaggacctgcagaaccaaagacagcgcctactttacctgttaattttgcatcagttgcggctgctaaagcgcctgcttcttcatggcggacttgaacatactttactgcttcgcgttcatggtataacgcatccatcgttgagttgaatgaaccgccaggaatcccgtaaatatgatcgattccccaagcttctaaaacattgaccatcgctacgcctgcattaatttttgccatcttcttcactcactttcattttgtaagttacctacctaaaaagtataacgcgtctaaaaaaaccagcaaagaaagtgtctcacaagaagtttacaggtatacctaaaatatgctaaagtgaatatgaataaccgttttcaggataccagtctaaagtttgttagtttcattaagctttttagagttaaatgaaatcggatgcagagaaaataaattttcaatggatcagcaaatggctaggttatccattgaaagagaaatatcagaataactaatatggaggtttgtatgattgaatggttattgggcctgtcagcctggcaacaagcgttagtaggaacgctgtttacttggggaatgaccgcgttgggagctgcattggtcttcttctttaaaaatattaaccgcaatgtgttgaatttgatgttgggttttgcctctggggtgatgattgcggcaagcttttggtcgttgttagatccggcgattgcagcagctgagtcgaatggttcgattccttggttggtggtcagtattggttttggtcttggcggcctgtttctttatatagcggataagactattcctcatatgcattttggtcctaataaagaaaaagaaggctttcctagtcatttaaagcgaacaattttattggtgttttccattacgctacacaatattcctgaaggcttggcagttggtgtggcttttggggcagcaagtgaagcaacgaatccaaccgcggcggttttggctgcaatctctgtatcattagggatcgggattcaaaattttccagaaggtgcggcagtatcaattcctttgcgtcaagaagggctgagccggacaaaatcatttatttacggacaagcgtcgggacttgtagaaccgatcgcggcagtaatcggagcacttttagtaacaagtgttcaaccgttgctgccgtatgctctttcttttgcagccggtgcaatgatctatgttgtagtggaagaattaatcccagaagctcaagcaacaacagacagcaaacatcactttggagtctttggagcgatgttaggattcattattatgatgattttagatgttgcgttgggataaaaaaaacgtcgaaagctgataaagctttcgacgtttgctattttaataggtccgtccgcgacgtttggtcaaccagttgactaagaagtaagcgatggctaacggaatggcaattctaaagaataaaccgatcaggcctgaaataaggggaccaacaatacttaaaatcaaactagcaactaagaaaaagccgacaacagctaaaattcgtacaaccatagggtaatctttcatcattttaatttccttctttccatttgttttaacttaaacatagtttagcaaacaattttctcacttacgtccaacttaagacgtatttattggcaaatctgttgtttttttgtttaataggagctgatatactaaattttagtaagtaacgaatggagttaagagaaaatgccaaagtcacgaattgaggcttttacagatgcagttatcgccattatcatgaccctattagtgttagaactacatgagcctaatggtcctagctggtccgcttttttacaaatggagcataaatttatcgtttatttgatcagttttgtcagcttggcaatctattggaataatcatcatcatctttttcagctagtccgaaaagtagatggctgggtattgtgggctaataattttttgattttaatgatgacgctctttccttatgtcactgcttgggtcggagattatcctttttcttggccgccgcaagctttgtacggcttggtgacgttaggaacagattttgcttactatctgttagtgcgggcactcgtaagagcaaatgggaaagagtctaaaattggtcaattgtttaagcattatccgaagtcttatctatccattggcttagcgatagtggcattaattttagggaaattaattgccccgattgcggtattagttgttaatgtcttgattttattaatgtggtttattccggaaaaatccatcgagaaaatcctgtaaaaagtgcagccaggtgttgcgcttttttttcgttgcaataccttaatttcagagaaaaaatttgtcgaacaggtttaaccaggggattttcggacatactgacatactaaagaagcttccgttataggctaccgaaaaaaatccctaagatcatttctttttcttatttctcttgtttttcccttttttcttcttttgatttcctccagtttttttctttccactattccccgaagctttggtagcccttctgttcaaagctttattttttcgaccttcctcgatttgttctttggtttttccatagcgtaagtagttgatatccatttcatgcgaatttccggcggattcaatggcagaagcagattccagagtagacagctccagcctcgttggcgttttttctttcgacagtggtggatatttcgcttctactttagcggcttcttcatcgtaataaggcgttgtggacgtagctatagcttgtttttgcggtgttttcttttcaatcgaagcttctggtatcgttgtctcttcgatagtttcggttggaacaacttcttcttgaacctctttatgctgtgcatcaatccggccttcatggctataaaaattcaaatattcagcaaagcgacgagcagtgggagactgaaaaactgttaagctcgttaagatttttaagacgttagcggtttcattttctaaatgtttagggattcgtttggtattacgcagcgtccaggtatgttttttgccatttgaatcattgaagcttgatatcaaggtgtactggtattcggaagggtccgactgttcacggttctttttctctaggaatttttgatagagacaggtttctttggtaaattggtggtattcgtttttatttttaaacagacgattcacgacgttttgccactcttcaagtgaaaagaacgactcaaaaaagacacagtgcttccgcaatgtatcgttcggtgttgtggtaagaaaaatttgatgaataagctctgttaatgactctagtgaaaaatccccgacgcataaagcatctcgcaaaagaatcgcaaccaaatactcaacaacctgtgaagcattcttagtttgttcaaagtatttcgccacacgcttcataagatttacatttttcattccaaaaatctgcctttgtccaagcttcactgtatccatcaatttcatcctccaaccatctatttttattcattatcaactaatagttttcacaaaaatgataatattagataacgaaaaagtaaatagctttagcaaatacccttttctgttaaaaaaaataaaccttttgaataataagttttttggtgtctttttgataaatagctaactgaaatgatagagtttaaaataacttaacgaaaaatagaatttatcaaataagcaatggagcgttttgctttatattttaaatctatagcgttattaagttttcgttgtttgttacaattttttttgaagaaaatcgtgtttaagactaaatattaattttttgtctaagccaagagctgctctcagtctagctgggatttttccataatcgctacactcggtcctttatctatggtagagtttaagcaaacgttttaaatggaggatatcaatgttagaagcgattatttttgatatggatggtgtcttggttgattcagagtatacgtattttcaaagtaaatcacagattttaagcgaagctggtcatgaggtagaagacagctatcattttcaattcatgggtacaaccagtgactatatgtgggaaaaaatgaagcaggaattctccttgcccttatctgtagcagaatatattcaacaaatgacagctttacgccaagcaatgatcaagagggatggcattagagtaattccgcatgttcaagagtttgtaaaaggtttgtctcaggcaggcttgaaactagcagtagcctcctcttcctcattagcagaaattaaagtaaatctagcagaaattggtttgtcggagtatttttcagaagtcgttagtacggaggaggtagagcattcgaaacctgcgccagatgtttatttggctgcggcagaacggataggcataatgcctgaaaattgcttaggcatagaggatacaaaaaacggcacgggagccgttcgcaatgcgggcatggtttgtgtaggctttgctaacccggcatttccgaagcaagatttggcattcgcagatagagtggtttcgtctttttctgagctagatgcggattcgttaacgaaaatttatcagaaagtgagggcgtctcatgcctaaagcagctatttccagtaaagcgtttctaattgaaggcggctgtaatgcctgtgggctacaaaatacagagacttttactattcattttgaagatcaacgatccgctgtattggatcattttgatgttccatcgcttgttcaagtgattgctcaaaagaatggatggcgagaaaaggctattcctgtagggattggcgaagaagagatcgttttacaaaaagcaaatgaggtaatcaaaccaatctattttggtgatcaaatcagctatcagaaggggaatgaacgaattcaaacgaagcaacgcttcaatgataatgacgtattatttgaacaggtaaacagtattttggtgcaactgtttaaacttgagccttatgagataaagatagccgttgagtaaataggttgagatagaatcggaaaaagtcgcagtgacaaaaaaacttgttactacgactttttttgtggaataaggaaaagatagcctttaaaagtatagacaaattcagagcctcaactttttgagccggatttttgcttttttatgaaagcgtattctaatatgaaaggataggagagactaactatatagagtcaagtaaaaattagccaaatcaaaaaatattttataacagataattccgaaaaaagggtacaacaaataagcttcttaccattagtttttttgaatgttcaatagctaatcagaaacaattatataaggctcgtttttagtcaaaatagcatgaatcacgtaacaaagcttacgagaaaccgcacctaaggcagttagatgatgttttccttcggaaacttttttctggtaaaacgcactaaaaacaggatcacattgagaagctactaaagccgccgaaaacaaggcttttcgcaaatatggagaccctcgtttactcataacattatgcgttgcctcatattgccctgattgtgtcacggaagcgtctatcccagcgtaagcaacgagttttttcgggttagaaaatttttgaatatctccgatctcaccaagaatagtcgcaccgtttataggaccaattccaggaattgtgagaataacagaatttaaagtgtccattatgtgcttgatttctctttccgtttcctttatttggctttcaatgaattttaattgttcaatcattgaacgtagttggaaggtgaacgcttcttgagcaaattttactccaaaggagttagaagctgcttgcttcaattggtccgctttttctgccttgattcggttcctgcttaactcagctaagtattgggccaaagtttctgaggaaatgttttctaagtcgatcggggcactaaacgccagcaataactctttagaagcttttccgaaaacgccctgcttggtaaaaatcgtcgcgtattctggaaagacttgatccaatacggctataatttttcttttgaagtcgctcgctgtacctactaaataagttcggtaacgagaaagttgtttcaaagaaaaaacattttcatcggataagaccgtttcgacaaatgagccatagcgcattaagtcagcaatcaaaacagaatcaataatatcgttttttcgtttccgtatttctgtacctttacgccatccgtctgtttgaaggggattcacaacgtgaatcaaataatctgattcgtgaaggtatgaaaagatggacagccaatagtgccccgtggcttccatccctataacaaagtcactgggtgctccggaatagtcgaccattcgctcaattaatgactctgctccttcagtggtgttaggaaatgaaaaaccttttagtaatacctttccttcctcgttcatgatagaagcaacgtgagtgcgtttaccgatatcaatgcctaaaaagtacatgtatatctgacctttcaaaaaaagaattttggattgaaatccactcaactgaaaagcgtcactaccttgtacgagatacggagtaaagtaaggactttcaacatctaactcatacgcaatccacttatcagagagaggagccagtctctcgagtgcgggttcaatgacccaaggggggaacggcttagcctctcaatccaataaatatattatctcaaaagaaatgagttaataccaaattaaaataacgatggttcatagggttatccaatcaaaaccggaaggttaaaaccctaactctaatatacaaggtggagaatatggtaaaacaatttgaaaaacagtttattggcggagaatggaagctaggaaatgatgtagaacatgtgaatgaggataaaaatccttatacccaagagacactcctgaaaatccaaggcgcgaatacagcagatgttgacgaagcttatcaagcggctcgaaaggctcaaaaagaatggatggataaaacacctcaggaacgaagtgagatcgtgaagaaggctgttgggataatgaaagaaagacaaacagagattatcgaatggctaattaaagaaggtggagccaccaaaataaaggcaggactcgaggtccgtttagcaaaaggaattactgaagaagctgccagctttccaatgcggacagaagggagagttttgccgacaaatacgccagcagaagaaagctttgcgatccatcgacctgtaggagtaatcggaattattagtccgtggaattttccttttcatttaacgatgcgttctttagcgcctgctatagcagcaggaaacggtgtggtgattaaaccagcgagtgatagtccggtaactggaggtctattgccggcaagtatttttgaagaagcaggtgttcctaaaggattggtcaatgtgactgtcggcagcggcagtgagattggagattattttgttgcccaccctataccaggatttatttcctttacaggctctactcccgtaggaaaaaatatcgccagtcaagcgatgagtggtaaaaagattaagcaagtggctttagaattaggtgggaattctccttttattgtactcgatgatgcagatattgaagaggcagctcatgctttgatcgtcagcaaatttatgcattcaggacaaatctgtatggcagctaatcgtgcaatcgtggttgaagcggtatttgatacatttgtccataaagtagaggaacgtgtaaaagagttagtttcgggcgatcctactgacgaaaagacggtgatcggaccaatcattaatcaaaaacagacagatcaaattcaagaaatcattcaacaagcgaaggagtctggagcaaaatttttagttgaaggcacggttaaaggacaactcgtcgagcctttcgttatagtttctgaagatcctgatttagaaatttttcatcgagaaatctttggaccggtacttccgattctgaaagtgaaggacacagaagcagcaatcgaagcggccaacgatacagaatatggtctatcaagtgccttattcactaaagatttagctaaaggacgcgctctggcaaatagaatcgaagctggtatgtgtcatattaatggtttgactgtcgatgatcagccgaatgcaccgttcggcggcgagaaaaactcggggatcggacgttttaacggtgaatgggtattagaagaatttactagagttcaatgggtaacgacaaattcaggaaaagggcagtacccattttgaattttgacattagcgcaaataattcttataagtagagctgctacaaaaagtactgaagtgaaaattgttcatttcagtacttttttgtatgagcttaaggaatagctcttgtatttattaacgaaaccagaaaagtctagcttacataaaaaacagacaattaatgagactcttgttaaaatgaatgaagaataagagtaccaagttgcataataggtgatcaaaaacaggaatgctgacatgcttttttaccgttatttagggatttctagtttttgttcatttttttttgcaaaaaaaagtatttgtaagcaccaagttgcataaagaacactgaattatttgggaacaaagaagatggaaatgtaagcgtttttcgtctaaattgaagatgtgaagagggatgagaatgaatttagaagaacgaacaaatcagatttttgttgaattagtcaataatccgcaaatcaccagtaaagcgttatgtgagaaattcgatttgacgcgagggcaattgaattatgcgttgaaaaagattaatgattctttaatagatgagaaattaagtgagatcaaacgaacgaaaaatgggcactttctgattgcgaatgagattctttcaaactataaggggggtgatgagcaattcggagaatcaacagaaagctatgtattttccggtaaggaacgggtgggcataatcgaattgatgttactaagcaaggaagagtatctatccttaaaccatttcattgaggatctaaaggttagtcgaaatacagtgctaagggatttgaaggaagtggatcacgcactttggcaacatgaactggctttgaagtataccagacaaaaggggtattttatccaaggcgacgagtggaataagcgaaatcttctgtctgatttattgaataatctcgcggtgatgtataacggaatcaatgtgattattcaatttgcgaatatcgatccacaacagatcgaaatttttcgcaaacgagtggagttggtagaagaggaattggatgttcaatttaccgatgaacgattaaaaacgttgccgctattaatcattttgatgattcgccgagcgcaaaagggtaaattgatttcttatagctttaaggtcaattatcgcgagcttgctgacacgaaggagtatcttgcagcggatcgagttatttgggatgtagacggcttaagtgagaatgaacgtgtgtatgtaacgatgctgctgttgacgacgaatctttcgcgaggcgatatcttatcggttaaagcgatcaataagatgaaagaggcgcttgaaaaggtcattgcgaattttgaacgtatcgcgggtgtcaatcttgaggaaaaagaaaagttattagagcgcttgctcgttcatatgcggccagcttattaccgaatcaaataccacttgaatttgcagacgcgtttttatcaagagaataaggatgccaaccttttttcattattttacttagtcaaggaagctagtggtcctttggaaacgtactttgaacagccggttcctgatgccgaattattttttatttcgttgtttatcggcagccacatcgttgagagcacggaaattattcaccccgaaaatcgtaaacgagcggtcatcgtttgtcctaacggtatctcaattgctgttttattggagaacaccttaaaaaatttgcttccggaaattgactttgtgagatcgatgtcggcacgggaattttatcgaacagaggttgatgcggatttcattttttcggcggttccgctgaaaacagaaaagaaagtctttgtcgtaaataattttttatctgaacaagaaaaacgccaattaagagaacgtgttttgcgatcaacggcgattattcagacagaagttgtaacgccagaaaaaattttggcagtagtaaaaaagcatgccgatgttgtggatgagacaagcttatacgaagaattgttaagtttgttcgcaccgaaagaatccaagattcttgaaaagaagcgaccgcatttgattgatcttttaaagggcgaaacgattcaaatttttgaggaaacgaccagctggaccgaagttttagaagctttagcgcgaccgctggaacgtcagcatgtaatcacgccagagtacgtgcaagctttgaaaaaagagatgccgatcctgccggcctataccgttttacgtcataagatcgctttgcctcataccgtaacagaagcgggagcaatcggagttggaatcagtctaggcttagtgaaaaaagggattctttcagaggacggcagacgaattcataccgttattctgctggggtccaacgataaagaggaacacttggatttgatttttgaaatgatgagtttggctggtgcaaatgaattggcacagttagaaaaagcaaaaacgaaggatgagattcggaaagcgttgctgcgttttaacgaagagtattggaggataaattgatgacagaaacgacactaagttcttatgtgaaagaaccgttagttttcgcgcaagagaactttacgtcacaggaagaattatttgagcaagtgtatcagaaatctttagacctaggttgggtccgagaggattttctggaacggatcgtgaagcgggaaaaagagtttcccaccgggattcaattaatgaattttggcgcggcgatccctcatactgatgccgaatgtgtgcgggaagaatttgtcgcagtgattacgatgcaagagccggtgactttttacagtatggaagataacacccagcaggtcaaagcccaaatcatctttgttttagggttaaatcaaccccacgcacagttagaaatgctgcaatcgttgatggggcttttacaaaatgaaacggttttatcagaattattgttagcaaccactgaaaatgaattagtgacaactattaaaaaaaatcagctatgaaaaaggaagctcgttctaccttttgcaaataggacagaacaaaaaataaaaaaacattaaaaggagaaaatcattatgaaaacaattcgtgtattagtagcatgtggagcaggaatcgcaacctcaacggtagttatgaaaaaagtcgaggacttatttgccagaaatgatctgccagtggaaatcacacagatcaagattgctgaagcagctgggaaacaggatgaagcagatatgttgatctcaaccacgatgcttccaactcaatacaagattccagcaatttcagccatggccttcttaactgggatcggaacggaaaaagttgagaatcaaattatcgaagcagcaaagagtattcaataattttttacattcaggtaggtcaactccgcgctttgcggatttgatgtgcgtgaagaggagtcaggtttatttttaatattaaaaataaatagatcaaaacaaattaggaggaatgtattaaatggatggtttaatgaatgtggtgcaaagtattttaggcgccggcgcaagtgtgatgctgcccatcatcatctttattgttgggattatttttagggttccaataaaaaaagcaattatttccggaattactgtaggtatcgggatgatcgggataaacttggttattaatgtattgaccacaaacgttggtccagcggcacaagcgatggttgaacggtttggtttgaacctgacgatcattgatgcaggctggccagcagtctcagccgggacatgggcgcaaccaatcgcggctgtgatgattccagtaatcttgatcgtgaatttaattatgttggcgttaaatcggaccaagacactaaacattgacatctggaactactggcatgttagttctgtggcagcaactggttatattgtaacaaaaagttttttctttggcatcctgtgcggaattctgtttacgatcattattcaaattatcgctgataagactgcgccgaaggtacaagaatattatgggttagaaggtatcagtattacgactggttcagcacaaggttatgcggttttagcattgccaatcggctggctagtcgataagattcctggtatcaataaattagacgtaaaacctgaaacgatccaaaagcgttttggtatttttggcgaaccaatgatcatgggcatcatcatcgggatgttccttggtttgttaggtggctacgatttcattggtatcctacaaattggaatgaacatgggtggtgtaatgttcttaatgccgcggatggtaaaaattctgatggaagggttaattcctattcaagagggagcacaaaaactattgcaaagccgctacggcgatcgcgaaatttatctaggaatggatgccgccttagcgactggctcaccggctgcactatctacaggtcttttgatggtaccaatcacattatttttagcagttattctgccaggaaaccgcgtgctgcctttcggagatttagcgacgattccatttttcgcagcgttagttgtgcctagtcgtaaaggaaatatcttacattcagtgatttcattgacagtcgtgatggctgttgccttgttaatggcgaccaattttgcgccagtgattactgaaatggcgcaagggatcgtgaagttcccagaaggcgctgccgaaattacgaacctagatacaggcggaaatttcttaaaatggatcttcttgaaattctcagaattagttgccacagtgatgtaggaggtttttgtaaatgagtaaaacaatgaagggtgtttccaagcaggcacccggttatgaccaaatggcatttatcgatttatctgttccagaagcaacagatgacaaggtcttgattaaagtcgcttatacaggtatttgcggatcagatatccatacgtttaaaggtgaatacaaaaatcccactactcccgtcgtcctaggacatgaattttctgggcaggtagttgaagtcggagccaatgtaacaaaggtcaaggttggtgatcgggtaaccagtgagacgaccttttatgtctgcggcgaatgcgattattgcaaggaaaagcagtataatttgtgtccccatcgaaaaggaatcggcacgcagcaaaatggctccatggcgaactatgtgttggctcgagaagaaagcattcatttactgccggatcatttaagctatgaaggtgcggcgatgagcgaaccattagcgtgctgtgtccatgcgatgtatcaaaagagtcacttggaattaaaagacacgatcattatcatgggccctggaccaatcggactgtatcttttgcagattgccaaggaaattggagccttcgtcattatgacggggatcacaaaagatgctcatcgcttagcattagcaaaaaaactaggtgcggatgtgatcgttgatacgatgaaggaagatctagcgaaagtcgtcaatgagatcacggatggctacggtgtcgataaagtgtatgatgcctcaggagcagttcctgctgttaatgctagtctgccattgattcgcaagcaggggcaatttattcaagtaggcttgttcgctaataaaatggtggatttagacactgaatcgatcattcaacgagagatcgaatacatcggcagtcgttcacagaacccttatgactggccgattgcgatccacttattagcgaaaggtgcgatcaatatcgatgagatgattacgaaaaaatacccgttgactgaatggcgggaagcctttgataaagtgatggaaggcaatgaaatcaaggtaatgatcgaatccaatccagaagaattttaatttgaatcaaggaagctgtaccagaatttttggtgcagctttttgtgagtttgttttataggaggatttttttgatactattttcatgagaacagtgtaataaataatcattagcaagaaattgtaaaagaatattgtatatcgagatattccaatcatcgttattttaaggcgaattcacaaagaaaacgtttactattcatcctgttcaagctagactataggaaaaaatgtaggcaggagggcactagatggatcttgataatcgaagcgtccagatattgcaggcagtcgcttctacggtgaaaatttcttccaaagaaatcatggaaaaatatgatctgactcgcaatcaattagactatgctataaaaaaaatcaatgattatcttgaagaaaataattatcgtaaaatcattcgctcacgtaatggcagctttatcgttgatacgaaagtggtcgatgttttctctggaattatgaatagtgaaagtcagctgcaagcagatgaaaacagttttttggatgaggatcatcgtttgctagttattttattgttaattttttctgcagattatctatcgctgtatcacttttcagaaagcttagaggttagtaaaaacacgatcgtatcggatatcaagaaactcaaaaagcaactaaaaaaacataagttaacgatcgattattccagaaaaggcgggtattattttcgaggggatgaagaagcggttcgtggcttgattcttgtagtgacagatcaagtgatggattctatttataatcgccttatttttgagaagtatttggccatccaagcgacagaaatcgaagaacagcgaaaaatgctgcgcatggtggaagatgagctgcaagttcagtatacagataatcggattcaaacagcgccgtactttttggtattgctagatcgccgagttaagaatggtcatatcattgagcaacgttttggcttgttggcaaaggaaattatggataccaacgaatatgcggcaattgtcaaagtgttggcggggcaaggaatgctgccgaagtcctatacggagcacctttatctgtgtctgtacattctttcgttgaaaataaccgatctaagcaatattttttccctaaataaagaagatctcagaaagcatattgaactgtttattgcgatgctggagagaaatacgattattcagctgaatgataaagaacagctgattgaaaacttagcattgcatctaacaccagcatactatcgcattcgctatgggttaacttctgactatacactgacggatattgttaaaaatcagttggaccctttattttttattgtgaaatcatcggtagcgcccttagaggaattttttgaagagcggattccgaatgatgaaatttatctgatcaccatgttcattggagcatacatgccaaaagaaaagccgatcaatcttgagcgtacgattgtcaaagcagcagtggtttgccccaatggtatcattagttcaaaacttttggaaaagacgttagacaattggttccccatgattcattttgtcagttctttttcgattcgtgaattctatgaaaaagaaaagcaattggatgttcaattaatattttctacaaatccgttaacaactgaattccctgtgatcgttgtaggaaatgacctatctgcaatgaacaaaaccttgatcgtcaatgaagtgatccagctgatctataaaattgatagttacaagctgcagccggatcatattttatcgatcgtcaaaaaacatctgtcaatggatgatgagattgaaggaaagattcgtaaagaattaatgatctcttataattctatttttcagattcaggatcaagagattttgaccaatgaaacaaagttaaatttgagcgatctgatcacaaaggagagtatcatcattttaccagatgagttgaattggttagatattcttcaagcagcgacgcaaaatttgattgatcgtaagattgttgaaccaagctatttatctcatcttgaggagcaatttcctgaggttacccccagtattgtgttggggaatcaaatcgtcattcctcatactattccggaacatggagcgcgtgagctggggatgtgcttggctaaagtttcaaaaggatttagcagtcaaggtcagacatatcgatatgttgttgtgatttcagcgattgataaaaaattgcatattcagcctatgatgcagctgcttaaaatcgctagtgatcctagagcgattgagcgtttggatcaggcgcagaacaaggaagcgcttctagcgattatccaagcattcaaaaagtaataaaacgatttcccattcatttcacgaatgggatttttgcattatctgcctatttcagcaattatttcagaaggagaaacgcttgtgaaatcaacgttttcagcaagtcatacaaatattcaggaataggttcagtaaaaaatgagttcaaaagaaatttaaaagaaagcgtttccgtgttatcttttgggtaagcaagaagcaaaacaacagaagtaggagggatcgagtgatcaaacgtgagttgctttttagcaaaatgaagccgcaagattatgaagagatgattacgttcttagggaaaaaaatggaagaattaggctatgtcaaatcaacctatgttcccgcggtattagaaagagagaagggctttccgactggattgcagatgggagattacgggattgcgattccccacacggaacgtgaacatgtgtatcaatccgctttagcaatcgcgaccctagcagaacccatcgaggtttgttcaatgattaatccagaagaaaaggttcgtgtatcgttagtaatcttaatggccgtagaggacccagatggacaggtgaaaatgctcagcaaattgatggggctttttcaagatgtcgaaacgttgaagcggttggagcgagcgtcatctgtagaagaaatgtatagtattgtggaaaaaatggagttagaaatcgcataaagaaaaaaggaggaagcagtaatgaaaagatacaatgtattgtcggtttgtggatcaggaacagtgacatcttcaatggtggcggaaaaattaagagaaacgttggaggaaaaaggctatatcgttgatacgacagaagcgaatcctaatgaagcattgtcgctagcgaagactggtaagtttgattttattacctatacgagtccgctacctgatggtgattatggtattcccgtagtgaacgcaattggctttttaactggatttggcgaagatgagtttttggaagaagtagatgaggtcttgttagcattagaaaaataagcttttgagaaaaggttgtatttggtttcttgcgaagataatttgttttgccagtatttggcagaactaaaataaatacattaaaacgaaaaaggatgctagttcccctttgcgctttagcgcattagaggaatagtatacggcttgagaatcagacttatttttcagaaagaaaaataaatacattaaaacgaaaaaggagtaatgagatgttagaaactttaaagagcgtttttgatacgtttggatcggctgtttttgttccggtaatgatttttgttgttgccaaagtattaaaagtgaagactcaaaaggcatttttatctggtttatatgcaggcgtaggtttgatgggtttcaccttgattttgaattcctacactccgattatttctaaagttgtacaacagatggtcgatcaaaccggaatcaatttgccagcatttgacgtaggctggcaggcgacggctttagttgcctattcgacagaagcgggcatgatttacttagtgattgccttagtgttacaaaccgttcttttcttagtcaaatggacgaatgtgttccagccttctgatttgtggaataactattcttacatggtttggggctcgatggtatatttggctacgaaaaacatgattttagccgttgtcctgatgtgcttattgaatatgtacagtctgttattgtcagaaatgttagccagaagatggtccagctattatcattatcccaattgtacgatcatcgcgatgcataatattgagccgggaatttttgccttaataatggacccgatttggaatatgcttggtctgcataaagttcgtttaaatcctcaagggttgcagaagaagctgggctttttaggtgaaccgatctcattaggattattcttaggtctgtttttaggaattttaggaaatatcagcaacttagcggaattatcggcgtggggacaaatcacagaagtagcgatcgcaacaagtgcggtaatggcaatctttccgaaagtggcgggaatcttctcacaagccttcaatccgatttcacaagcagctagtaaaaacgttcgtggcaataatgaaggtcgagaatggtatctaggagtaaatgatgcgactggctatggtgaacctgctacgctgatctcaggaattcttttaattccgatcatggtgttcatcgcaatgatcttacctggaaatcaaacattaccagtcgttgacttgttagcgattccatacatggttcaggcgctagtctgcttatcgaatggaaatattgcgaagacattgttaaatggtgtgatctggttcagcttaggattatatatgtgttcatacactgcgccaatgtttactgaaatagcacaaactgtaggggttactttgccggctggcgcattgatggttaccagctttaatatcttaggaaaaccgatttttgggctgatcttcttggcctttttaagtcagaatccattgtggattggtttaacgattgtcgcttattttgttgtttacttcttattccgtaaaaataaagaagctttttatggctatgttgaacgagctgcagcgaaaaatagtggtgagatccctgaaggcaaaacaaaggtagcttaatagagaaggatgaaagaaatcatgacaaaaaagatgaaagcaagtgtgctgataaaacctggtgtgttggaagttcaagaagtggatgttcccgatattggtgaagatgaagtattagttaaagtcgcttacgcggggatctgcggctcagatgtgccccgcgcaaacttagaagatggtgcaagaatgtatccactcattttaggacatgagtttagcggtactgtagatcgggtaggatcacaggtcactaaagttcaagtcggagataagatcgcagttgcaccactgatcccagacccaaattctgaatatacaaaagaagggtcttacggtctcagtgataattataacataatcggtaccggcagtaatggggcctttgcagaatacgtgaaagttccagaagagcattgtgtggtaatgccggaggatttggatttgttgtcagcagctggggtagagccggcaacgattagctggcatgcgatgcagcgatcgaacatgaaggttggcgacactgtagcggtgcttggttgcggaccgattggtcaatttgccatccaaatcgcaaaaatatttggcgcgaaaaaagtgattgcagtcgacatttttgatgagaaattggctttagcaaagaatttgggcgcggatgtaacaatcaacagcaaagggcaagatttagaagctgcaatcaaggcagaaacaggtttaggggtccatgtcgtaattgagactgcgggtagtaaattcactcagaagcaggcacttttgattacacgtaagcacggaacggtcgtattagtaggaatctctcaccaagatctgccattatcagagcacgaggcagaacgaatcatgcgggcagagttaaccattaccggttcatggaactcctatacggcaccttatcctggccgcgcctgggaggcgacattagaagaaatgtctaaacgtcgaatcaagttcaaggaaatggtgagtaatgaaattaccttaaacgatttgccagaggtgctgcctaagatgttcaaacgcgagcttgcctataacaaaatcgttgttgctgtcaatccagagtaagagagggccgaatcaatgttagaacaattaaaagaagaagtatttcaagcaaatttagatttacctaaacaaggtttaattaaatacacttggggcaatgtcagtgcttatgatcctgaaacgaagtattttgtgatcaaacccagcggtgttagctatgaagaaatgacagcggaggatatggtcgttgtcgatttggaaaacaatgtgatcgaaggacgattgaatccatcttctgacacaccgactcacgcagtcttatataaagagtttccggaaattggcgggattgttcacacccattcaacgtgggcagctgcttgggcacaatcagggttagacgttccggcaatgggaactacccatgcggataccttttacgggtctgttccatgtgcacgttttttgagtcaatatgaaatcgatgaaggctatgaacacgaaacgggctgtgtcatcgtagagacctttaagcaacgggaaatcaaacccttagaggttccaggagtgctgcttcatggtcacgggccatttacatggggcaaggatgctcatagtgccgtgatgaatgccgtagtattggaggaggtttgtaagatgaacctgctgacgcggcaattaaattcctttgctgaagagctgccgcaacgtgttttggacaagcattatttacgtaagcatggagcaaatgcttattatgggcaaaagtagttattaatttgggaggaggattacgatgattagcgatttgtttgttttgattggattggccttttttatcaaaatcttttttgatggcgccaaaaaactcgtgattggagcgaatggcgatgttgttaagagcaaaacgtatctgattcatggtgtgttaggtgtggcctttatgatcgtggcacgactaattacgattctcctctaatctatagttaacaggggatgataaagtgaaacttcatgagatcaatcaagctccttttatcaaagaaatgtgtgaagccaccagtcaattatgggcgtacggctgggcagagcggaatggtggaaatatcagctatcgcctgccgcaagaggaggttcaatattatctcgatagtgatcaggttaaaagaactattccattggattttactgtaaaaagcttagcaggtgagctatttctcgtttcaggatcaggcaaatatttcaaaaatattcaaaagaatcccgctgatagtttagctatcattcgaataagtgcagaaggcgacaggtatgagctgctgtggggactagagggtggtgatttgccaacgagtgagctggcgtcacaccttcaatgtcatgaagctcgtcttgcacaagatccagagcatcgggtcattttgcatactcatgcgacggccatatcggcgctgacgtttattcacgacctagacgaaaagaaattcactaagacgctatggcaaatgatcacagaatgtttagtcgtttttccagatggggtgtcggttcttccttggatggttgcaggaacgagacaacttggagcagcttcagctgacaaaatgcagaattctagaattgtgatttggccgcatcatggaattatgggtgccggtcaaacgatggacgatgcttttggtctagtggaaacggcggaaaaggctgctgaaatctatctgcaaatttgctcagccaaacaagaaattaagcagcagatcacagaccagcagcttttggatttagcagaaaagtttcacgtgaaaccgaaacccgggattttattggaagaaggtctgcgcagtgactaaggtagtcgtgattggtgatcctttcgtttcagcagcaaatttggcaaatgctgcaaaaggactactacttgaagagcccgttattattcaaagcttcgagtggcagtctgaaaaaacacggtcagaatttcgcgaagttatcaaaattctggaacatgatggaccgaatggttttgaatggtctgcggagatcttggcagaagtagcggaggccgagtatttgctcgtacatttggcgcctgtttcacgaaaactattagctcaagcaaaaaagctaaagatgatcggcacctgccgaggtggactagagcatattgatctggaggcagtgaaagagagacctggactttcggtaatcaatgttattcgaaatgcggaaccagtcgcggattttacgattggtttgatgtatgcgactgttcgcaatatcgcggcttctgctattcaagtaaagcagggaaattggccgcagaatttttccaatgatgcatataaaacctccttttccaatctaaaagtcgggctagtgggattaggacatattgggaaaatcgttgccaaacgtctaactgctttagggttggaggtcagtgcttatgatgcgtttatcgatcaagccagcctagatcaagaaggctatcaaatcaaattaaaaagcttgaaggagattttcagtgattcagatgtagtatctctacatttgagagtagtaccagagacccagaatttgattaatcattcgttgttgcgtttgatgaagcccagtgcctatttgattaataccgcgcgaccggatattattaatcgagcagatttacttgactgtttgacgaaaaatcagatcgcaggagcgggtatcgatgtcctatgggaagaaccaatcgcttctgatgagcctttgctagcattggacaacgtagtcatcacttcacatattgcaggagacaccatcgacgcgatagaccgttcgccgcaattattgcaagtagaaatgaatcgaatattaggaaaagcgtgaattttcactcatctaagagttgcatttaacaattttaaatgtaaacttttagatgggtgtttttgtcagtttttcttcctgctttagcaggttagaaaaatgatatgcgtacgaaaataaaaccatttttcacgctttttgaaaaatgaatacaacagtaatgagctagctgtcagtttttcttgcctttgcaggttagaaaaacacctaactacatggagttatctgggaaatttaatgaatgaggcgataatatgaagcttacaccaaaggaatcaggtgcgtatcaaaaacattttttaatggatacggaagcaatcaaacaatatgttgtggaaagattgggcgcttttccttcagggacaccaattgaagtatcggagattggtgatgggaatatcaactatgtttttcgcgtggtgaatcaggcgacacaggaaagtctgatcatcaagcaggcagatatcctgttacgttcttctgggcgaccattagacattgagcgaaaccggatcgaagcagaaattttacgactgcaaaatgaattggcaccgcagtttgtaccagaggtttattattatgaccaaaagatgtatgctttgacaatggaagatgtctcagcctatcaaaatatgcgctatgaattgattgacaagcagatttttccagattttagcgaaaagatcgcggaatttttagcacgtacgttacttttaacaagtgatttggtcttagatcgcgacgtgaagaagcagcgcgtcaaagacttcatcaatcctgaaatgtgcgatatcagtgaagatctagtatttactgagccatatgatgattataagcaacggaatatcgtgactgcaggtaatgatgattttatcagagaaaacctatatgaaaatgaaccgctgcaagtagaagttgcattgctgcgtcataactttatgaataatgcccaatcattgctgcatggcgatctgcatacgggatcgatttttattaatcaaacggggttgaaggtgattgatccagagtttgctttttatggtccagcgggctatgatatcggcaatgttttggctcatctttattttccaatgattaaaaatttgtttgattcgacgagcgatcaagaattccaccagtggtgcaagaaaacgattgccgctgtttacgatcaggttcaagaaaaattagagacagtctacgatgaagcagtgacttttccgttgtatcggaatcacgcgtttaaggagataatgttgcaaaaaatcatggaagatgcgatcggctatgctggaaccgagatcattcgccgcgtggtaggagattcaaaggtgagggaattatccttgattccttctgataaaaaggtcacggctgaacggattttattaaaaataggcattcaattaattattaatcgacaacatgttattagcggcagtcagctagccgctggaattgacgaagctgtcaattcggcttttcctagtatgcagaattaagaaagatgaggaattgccgcaaatttagcggcacgttcagcactaaaaggttttagaacaagattccttcaacagaagcaggtgaacaatttggaaagacaagattatacgatgccaacattgctgcaatatgagaatgtcgcgtggtacgagaaggggaaagtccgtattttggatcggcggatttatccaacgcggctcgaatttgtagagtgtgaaacgcatcaagctgtagcgcaggcgattacggacatggttacacaaagtgccggaccttatactgcggcaggtatgggtatggcgttagcggcggaagagagccgcgatttcgcaccagaagaacagatcgcttatctaaaaaaagcatctcacacgattgccaacgcccgtccgacaacagcaaatcgcatgacactgatcacagaaaaatgtgtagaagtagcagagcaagcattggacaaaggggaagatccaaccgaagcgatcaagcaaaatacgatcaattccttaaatcgccgttattatacaatggatcaggtggctaaatacttgatcgaaaaaatcccggataatggaaccgttctgacgcaatgctttggtgaaacaatcattgggatgctgctgagagaagcgatcgaacagaacaaaacgctgcgtttcttttgtacggagacgcgtccatatctgcaaggtgcgcgattaactgccagctgctgtgcagaaatggggtttgacacaaccgttgtttctgataatatgatcgcttatttaatggcgcatgaaaaaatcgatttattcacttcggcggcggatacgatcgctcaagacggctatattgccaataaagtcggtacgtatcaaatcgcaattttggcgcaaaaatttggtattccttactttgttacaggtattccagatacagataaaacaagtcatgaaagcatcaaaatcgaaatgcgcgatcctgagcaagtcatggagttaaatgggatcaagcatactttagccggggtcaaggccatttatccttcctttgatatcacaccgccagaattaattggagcagttgtgacggatcgtggaattttttcaccctatgacttgaaacgctatatcaaagagcagccggaaaataatttttattgattgaatgattacgtgataaaaatagaatcatcaatagcagtgaggagaagaagatgaagcatttaaaagagcgtgagctgatcgttgactatggcaagaagcttatcactgaaaaattaacgacaggtactggcggcaacatcagcatttatctacctgaagaagaagcgatgctgattagcccaagcggtattccttattttgaaacagaaccagaagacattgtactaatggatcttcatggcaatgtgttggagggcaatcgtaaaccttcaagtgaatatgatcttcatagtattttttacgcgaattgtccagacattcgctcagttgttcatactcattcagaatacgcgacgacgtttgcctgtctgcagcaggagatcgaaccattgcattacatcattggttctgtaggggagaaaattcgttgctgcgagtataaaacgttcggtactcgggaattagccgaggaagcctttaactttattcatgaagacaacggaatcttgctaggcaaccatggcgttttgaccattggcccagacttatccagtgcctttggtgtggcgaaagacatcgagtttcttgctaaactcgattatcgtgctcgctgcattggaacaccgaaactactaaatcaaggacaaatgaaagaagttctagaaaagttcgaaacctatgggcaacaataataaaccgctgctttgacgggagtcaaggcggcggtttttgtttttcgtagaagtaaataaaagattggtcaagtgaaaattttgctgttcgtttattcacaattaaaatagtctgtgagaatttttgattggtctaatattttttttatagctgaacatcctatatgtataaatttttttcttctggatagattgtgaacgaaccttcatgctcatctccttttctattatatttctaaattaggacctcttttctattttttatatattgttattttaagaatgtgcaattgtgacttttttattgtttgaattatttcaattttatagataatattctttagatattgatatatcacgttttttacggtaatttttacttttgtaacatatgttccaattggtagaaaacggtagtttgtgaaaagaaagcgttgacacttatttttacgatgttatactaaaagtgatttaaggcatatgtcaaatgtgttgtcatatgtcaaaaaagtatggaggggtaacaatgacactttatgggaagcttttggaaagagaaagaaatggcgcaccgatcaaagttggggtaattggtgcaggtcaaatgggttttgggatgattgctcagatttcgacgattccaggaatggcagtgactggtatcagtgatatcaataagggtgccgcgcagcgagcagcggatgcttataatgcaagtgcagagaaaaaagtggatatcttggtcagctcagattttaaagaaatcattcattcagacaaggtagaagttattgttgatgcgacaggtgtcccagaagttggcgcccaaatttcattagaaactttattagcgaaaaaacacattgtattgctaaatgtggaagtggatatcacaattgggccattgatgaagaaaatgtacgatgcggcagacttagtgtatacaggatctgacggtgatgagccggctgctacgacagaattatttgaatttgcaaaaagcatggggatggaagtcttagttgctggtaaaggcaagaacaacaagctgaaggttggtgcaaacccagatactgcgcaagcagaagcggattctaaacagatgtctagccatatgttagctgcgttccaagacggtacgaagactatggctgaaatgaatctactgtcaaatgcgattggattcattcctgacaaagtaggaatgcacgggatcagtggagatgtggattcagttattaaggatttagacttgaaggaaaatggcggtatcttggataaatatggcgttgttgaatatgttgacggcttggcgccaggtgtgttcgtaatcgttaaaggtcaaaatgacggtgcgcgtcatgagttaagttacttgatgaaaaagggtgatcgcgatcatcatatcttgtatcgtccctaccatttagcaagcttagaaacaccgattacgattgcaaaagcagtcttgaatcacgatcatgcaatcgttccattaggtgctccaatttcagaaactgttgcggtagctaaaaaggatattaaagcaggcgaaaaaattgatggcattggcggttattgcgtacgcggtgtgttagaaacccatgcagatctggtgaaaaacaataatgtaccaattggtttagttggtggttcttctgtagcgaagcgtgatatcaaagatggaaccttcttaacctatgatgatattgagattgatgaaacaacgacggtttatcgtttacggaaacttcaggattcaacgtttggtgattaaggcaaatttaaagcagatgagggataccctcgtctgcttttggagaggatgtagcttatgagtggcttagtaattgttttaatcgttttgatgcttagccagagcctgttgagcattgttcaggtaaaatactatcagcgttttattaaaaaaattacgacagaacaagcaggtacagagtatgagttttataccgaggtcgtaaagggaagacttttacgagcgatcgtcgcggtagttgtggatgcagaaggcagagttattcaatgttatgtctgtaaaggtttgacgatatttgcacgttttaaagagaaccaatcgtataaaggaacccaattggttaattacagtaatgttgcaaaagaaaaaggcgcatctcaaacagaaaaagcattatcgcagatttacacacgaaaattggaagcggttacctagaaagaggaggattttataatgaaatatatcgaatgggcagggaaaaactttattggtatgtttgaagccggcggcgaacagttcatgggttacatgactggaatcgttccactattgattgtacttttaacgtttacttattcagttattgcatttattggtgaagaacgtgtagatagagcgatccgttattgttcgaaatatatgattttacgctattcattaatgccgattttagctgttttgatgctgacaaatccaatggcgtatacctttggaaaatttgttaaggaagaggaaaaaccggcgttttacgatgcagccgtttcttttgttcacccagttactggtctatttccatatgcgaatgccggagagctttttgtttacttaggaattgccaacggcgtaacgaaagccggatttagccaatcaagtttagctgtccggtatttcttagtagggatcgtggttatcctgattcgcggaattgttacggaaagactaacgaaattcatgatggctagagaagcgaagaaagcgactgcgtaaaggaggaatcgtaatgtacaaaacagtatttgtaaaacctggaagtaaaggttggggtgttggtctaacattagttccatcagagcaaaaaaataaagttgtttctgttacaggcggaggtattcatccggtggcgcagcaaattgctgatttaaccggttgtgaggcttgtgatggctttaagaatcaaattccagaagatgaaactctatgtgccgtaattgactgtggcggcacggctcgaatcggtgtatatccgatgaagcgcataccgacagtggatgttttgccgtcttctccttctggtccattatctaaacatatcacggaagatatctttgtttcaggggtccgtccagaagatgtaactatcttagaagaggcgaatttagaagaaaaacaaatggcagcgattaatcacgctcatgcacaggatgcagaatcagcagccgtgacagaaaaaattgtgacaaaacaagatgaaggtcgtgagtctgaagaagagttcagagaaagatattcaaaaatcaaagaagagcataaagaagaacaagcgaaaaaggacagcttcttagttcgtttctcccgtggtatcggcggagtgatgagtaccttctaccaatctggtcgcgacgcgttagatatgctgctgaaaaatattattcctttcatggcattcatcagtatgatcgttgggatcattaactacacaggtatcggtgattggttggcgaaagttctttcaccattagctggttcactgcctggaatgattgcgttggctttgatctgtagtattccgatcctatcgccgattttaggaccaggagcagtaatctcacaggttatcggagtattgatcggtacccagatcgccaatggctcaattccagtacagtatgcattgccggcattatttgcaattaatgctcatgtaggttgtgactttattccggtagggttatcattaggtgaagccaaaccggaaaccgtagcaatcggagtgccagcgattttatatggacggatgctgactggttttactgccgtaatcttggcatggttggctagtttcggaatgtattaaaactgtttgaatggagcgaatggatagatggtaaaaaccaaaattattgaaatcggcagcatggtgccagcctttgaagaagaacgcttagttattttgtttggtccttctgcaacggcagaattaaaagatatttgtgtgattcatgagttcgaggatcagcccaaggatgcgttgaaggtcggcggaaaaatcaaattcggcgatcaagaatttacgatcgaagaggtaggttcgcaagcaaatgcaaattttgaagaattgggacatatttcgatttattttcgtaacgcaattggcgaaatccttccaggggcaatcattgtcagtcctggcaatttcccaagctttgaagtcggtggcgtgatcgaaattatttagtttaaaaggtcgaggatgtgccgaaaataggtcatcctcggcttttttagtaaatagagcaattctgtataattttcgtacttgcaggcgcgcaggatcaaccgtatagtgaatgggatcaaagtagttcagaaggtgggatcaaaaaatggctataaaacataatcgcgacatcgtaaaagtggctacgatgtattacaaaaagaatttgaaacagtcggagatcgctaaatacttgggcatttcacgttcactggtttcaaaatatttgaatgatgcaaagaatgaagggatcgttgatatttttattaaaagcgagagcgcctattccatcgaactggagctggctttagaggaaacattcgggttgaaaaaagccgcggtcttagataccagcagtttgcgaaaagacgagaccgaacgcttattagtccaaacagcgatcacggcctttcaaaaggagatcacgaaagctcaaacgatcggtctttcttgggggaaaatgctgcggggaatcgttgatgagtacccatatgaaaatcaagcagataccacgattatcccattaatcggcggactagggtcagagatggtagacgttcattccaatcagttggcctatgatctagcgaaaaaacttagagcgaaatgtaaatatctctatgcacctgcactggtggacaatgcatttattaaaaaaagtttgattgaaaatgacggaatccgcgatgtcttggaagcgggaaaaaatgttgattttgcattagtgggaattgctagtccgttttctaaaaataatacgatgacggagatcggttatgttgatcagcaggatattgatgaactggaaaaactagatgtgatcggagacgttaattcaaaatttattgatcagaatggtcaggaagttacctgcgagatcaacgaaaacgtgattggtctaggtgttgaggatgttcggaaaatttcaaatgtcgcagttgcctgctacgaggaaagcaaaaaagaagtgctgtacgtcggggcgaaaactaaaatttttacccatattacagtgacagatagcttagctgaatacttattagaacgagcaaaaaacgagacgtcttgatgaaacgtctcgttttttatttatagggaaaatataaaatttttacatgattaaatcgctatatccatgtccgactttacaaactagctattctacgcaaactaagcatacggttactgctaaactccattaagcagaactagcatatcggtaataagcaaaaatattgttcaaaagctgagcgagttggcaaagcctttcttattgaacgtatttttgtaaaaacgccgtaacttttttctgatacatggcaggatcactgctcagagcttttgcatgtttagcgtcatgaacgatatatttttcctttggcccattggtcgcgttataaacctcatctagcattgaataaggaacaaagtcatccttgtcaccatgaatgaagagcattggccgcttgttcttgttcaactgtttgatggtatctgcctcgccaaaaaaatagcccgcacgtacttttgttacgacactggtaacaggaatcaaagggaatgccggcaaattgaacatttgtttcaactgataactcaattccccattaacagagctatagccgcagtcttctatgaaagctttgacattatccggcaatttttctccgctagtcatcataaccgttgctcctcccatactaacaccatgaaggacgatttctgattgaggatcttgcttgacgattcgattgatccattgaagatagtcttttcgttctggccagccaaagccgatataatcgccttcgcttttgccatgaccacgagcatccggcattagtacgttatatccgagatcatgatagatttttgcatattgcggcatgtctgaagcttgtcccatatatccatgagcaatgatggctgttttgtgctgctctttttcagctggcagataataagcagataaattcagcccatctgtggatgtcaactgccaatctgtacggttatttttattattgaaccaatcttcagcggcgatcaattccttcgattttttatctgaactctccgccaagaaatcttttttggccggaaccacggcgtatgaatagaaataatttcctgctgcaattagtgctatcactataaccaggacaattcctaaaattatttttattggtttactcatttttgcctcctctaaatgtatcataagcagtataaagaaaattccgactcataacaagttcacacactgtcgtatttacagaggtatatattcatgagaaaatgtagcagagtttagagcaaggatatcagttctgcttttcccagatgaaaaagtttgagcaataatcctgaattcttagggcaattgagcaggagcaatttagcagaatgatatacgtcgcgaagacaaagtgatttttataaaaatcattaccttatttatgagcaaggatgtcagttctgcttttcccagatgaaaaagttcgagcaataatcctgaattcttagaacaattaagcaggagcaatttagcagaatgatatacgtcgcgaagacaaagtgatttttataaaaatcattaccttatttatgagcaaggagtaagcaaatgaaaaataaaaaaattacgattaaagacgttgcgaagcaatcaggtgtttccatcgcaacggtttctcagattttaaatggcaacgatcaaaagtttagtccaaaaactgtcgaaaaggtgctggcagccaaagatgtattgaattatgaaccagattattttgcacgccgtatgattatgaaaaaaagcaagacgattggtgtcttagttcccgatatcaccaatcctttttttagtactttggtgcgcggtattgagggtgttctataccgcgaaaatttcgtgactatgttctgcaacgcagatctggatacgaaaaaggaaacagtttatttagaagagcttagtcgtcgcggtgttgatggctatatcatcgccagctcagcgatttccaatcaggcgatcaatgactctttacgaaaaaaaaatctgccctatatcgtattggatcaaaagaaggcagaaggcttcagtgatgcggtcttgactgatgacttcacaggcggaaaacttgcaggtgaacatttaagccaattaggtcatcaaaaagcagctgttgttttgccagaggatgcgacagaaaatattcagacacgactggcaggttttcaggagatttatcctgatgctattctgattcgtggagacttaactaaaaacggcggacgccaagcagctaaagagatcattaaaactgaggcgactgcgatttttgcgatcaatgatgaattggcttttggactttatttgggtttggcagatctgaataagaaaattccgcaggattatagtgtgattggttacgacaatatcgatatgtgcgaatacgtgacgcctcaactaacgacaattgcgcaaccgatttacgagctaggccaaacgaccgcacgattattactggaaagaattgaacagcccgagaagcattgggaggagaagaccctgccggtacagctgattcaacgtttttcaacggcacacttgaaatagctttcaagctgtgctatatttttggtgtcgagttaaaacgttttaataaaacgttttaacttaaaagcaaatgaatgagtttaaagaacgagaaatggagtgaagaaaatgaatacgattacagtcattgggagcatcaatcttgatcggacaattcgtgtaaagcaaatgccaaaacctggtgaaaccatgcataccaaggaaattttttcagctggcgggggcaagggtgcaaatcaagcagtggcagcaaaacgttctgaagctgttacaaattttattggggcaatcggcaatgatgaggctggcgaaatgatgtgcgaacttttatcagaagaaggcattgaattagctggtgtacaaacattggaaaagcaagcgacagggcaagcttatatcatcgtggatgatcaaggagaaaatagcatcatgattcattctggtgccaacaatgcctttacacccaaacaagttcaagcgcatacggatctaattaaggcgagtgattttatcattgctcaatttgaaagcactttagaaagcacggttgaagcctttacgatcgctcgtgaagcgggtgtgaaaacgattctaaatcctgctccggctctagaaaatgttcctgaagaattattgaaggtaaccgacatgatcattccaaatgaaacggaaaccgaaattttgacgggaatcaaggtcacagatgagacaagcttaaaggctgcagcggatcatttgcatcagttaggaattgaagcagtaattatcaccatcggtagtaaaggtgcattttatgatgtacagggtcgtagcggcatcgtaccagcattcaaggtcaatgcagtggacacaaccgcagcaggcgatacctttattggcgcgatgagtagtatcttagccaaagatttcagcaatttggagcaggcgatcgaatacggaaacaaagcctcttctctaactgttcaacgctttggtgcacaaccatctattccctataaaaacgaattaaactaacgaaaggatctttaatatgaaaaaaagtaaagtcattaactcagatatttcacgcgtgatcgcacagatgggtcactttgatcaattaagcattggcgatgccggcatgccggttcccatgacgacagaaaaaattgatttagcagtcgataatggtatcccaagctttatggatgttttgaataatgtgctggaagaattggaagttcaacggatttatttagctgaggaaatcaaaacagaaaatcctgacatgttgaagaaaattcaagaacgtttacctgaaactcctgtgacgtttattcctcatagcgaaatgaaggcagcgttgcatgatagtcgagcatttattcgaacaggcgaattgactccttacgcgaatattctattagagagcggcgtcgtattttaagaattgtcataaggaggaaatactatgaacacaacagcaattttaatcggattaggcccgttacttggttggggactttacccaacgattgcttcaaaaatcggtggtcgtccagtaaatcaaattttaggttcaactttagggaccttgatttttgccttcgttttcgcattagttaacggaatgagtttaccaacagggatggatctagtcttctcgattctctcaggagttggttgggcgattgcccaaatcattacctttcaatcctttacgctgatcggttcctcacgggcgatgccgatcacgacagcttttcaattattgggagcatctttgtggggggtatttgcattaggtgattggccaggcatgaacgctaaattattaggtggacttgctttagttctcatcattttaggtgcatggatgacggtctggacagaagagaaaacacaggaaaaagccaacgtcttaaagaaagcggttctcttattagccgttggtgagatcggctactgggcttattctgctgcccctcaagcaacgaatattgatgggatgcatgcattcttaccgcaagcgatcggaatgcttctagtagctcttgtctattcagtaattttaagtgtaaaggataaagaaaaatcggcacttgcagaagccgtttcttataagcatattttttcaggtttctttttcgcttttgcagcattgacttatttgatttcagcccaaccagatatgaatggattagcaacaggcttcatcctgtctcagacttccgttgttctagcaacattgacgggtatctggttcctaggacaaaagaaaactaaaaaagaaatgaccattacgatcattggattggtactgattctagctgccgctgcgatgacggtaatgatctaaaaattaatgataactttcagacgaaaagtaggctaaaagcttggtaagctttggcctattttttcgtctaaattaagtttgaaaattgtttgatgagataaaaaagacaagtatctcttatgtgaatgctataatcaaagcatgaaaaagagcatgccgtttttattggattaataaacgggcatcttgattttattagcagaaagaaggaaaactatgaagctgacagtttcgttagatattttagaaaaaacattctattatgtttcgccagttaagcctgtatcgacagttccgttaatttacgcgacttttttaatggaaaaagcgcaggtggcttacactacagaaaatgaagtgaagttcgcgcgtaaggttgagcgatcatttaaaacagcttttcatgagattgtggaagcaaatcaggaatatcgtgagctgttggatcaggatcagcttttatcctctcagcaacatttgacttatcaggctaatttgattgattctgtgatagcaacgattcgagaatatcctgatatgcagttgattcgtgtcgagcttgccggaagctggccagtgtttcaaacagaagctgggcgtctggatttgggcgaataagtttgttaaaacgtagatagatgttacagttaaattgaaagggtgaagaaaatggaacttacatattttgaaggacaagcagcattcttagaggattatcaaaaagttgctaaggcagcaacgattgaccagcaacaagtagtcgatgatgtaatggaagaattgaacaaaccgacaccagacgaccagctttattacattttaccaggtgataaaacggctaacgggcaagcagtccgatttcccttccggaaagaattgatcgcaatggatgaagatgcaacagtttcaacgcaatttttctatgaaggatcaccgtacgaatacgaagttttagaagaagaacaacgctaattacgcaaggctttcaagtttaaatgcttgagggtctttttttgacttgctttaaaagtagaagctggtatgatagatacaatatggtttgttattttttagcaagaatgggaggtgatggtcttgcatgatcgactagcagcagggctatttcctgcaagcaatgaattaaaactgaaaggaagttaatgaattgtttattcttgaaaagaaagcggaaccaacacaacaaatatggacacacatcaaacgtcactatcagggggagaaagtagcagttgttggagtcgagaagcaattgccacaaaccttcttacgaaataagcaagttattttttatgaaagcctgactggacgatcgttggtagaagaaggaaaacgatttttagacaaattctcaaaggattattctgcttttgtcttttatgtagactgtccaaatgaagtcgcagaacagctcatcgaagccggacgtgctttaggcgttagagtaacggttacggtgaaagcgaaggcgaaggctgcttaggaaattagccatgtggaaagaagtgattcaccaaaagacggtccaaaatacgattttacgaagtggattacgtctgttacatcaaagtacgtggcgaaaaaacaaggacaaaaaagcattattagaaattgccgctcatttgcaaaatgtgatgcagttacacttagacaccaaaaacctagttgtcggcgttcctggttttgggaaagaagtaacactgttggagataaatgagacaaggtttgttcctcactataggattgatcaagtagttgaatctgccgaagggcattttatcaagctaaaacgaataaaaactatataattaatacaaaatggacccagtaaaaccactcttatcatgtaggttttactgggtccattccaatggggacgatattctagaagatcaaacctgtaataatagcgctcaggaaactgaccagactggcgcttagtaagattttcaacccatgtttagcaactaaattgcctttttcttcattcaagcccttcatggcaccggagatgatcccgatggaggagaagttggcgaaggaaactaagaaaacagagatgatcgctgtcgtgcgaggggagaagtcccagttgcctttggctaattctgtcatggcaacaaactcattcgttaccaatttcgtagccattaaactccctgcatcgactgcttcattccaaggaatcccagtaatgaacgctaatggagcgaaaatgtaacctaaaatttcttggaaggtcaagccggtgatcttagcgaaaatgaaattaatcattgcgatcaaagccacaaaaccaatcaacatcgctgccacagtgatcgctacatggaagccgtccaagatatattcccccaacatttggaagaaggtttgctccttatcctcttcaatcaccaattcgtcatctgctaattgataggggttaatgatcgctgcgatgatgaatccgccgaataagttcaaaacaagcgcagtaattacataacgtggctgaatcaacgccatgtaggacccgacaatcgacatcgaaaccgtagacatcgccgagatactcatagacgttaaacgttgttcagacaaagaaggcagctcctttttaatagaaataaagacttccgactgacctaaaattgctgaagcaattccgttgtaggattccaatttgcccatgccatttattttactaagggctaagcctacacctctcatgaagaggggcaaaatcttcacgtaacgcaaaattccgatgattgcagaaatgaagacgatcggcattaagacatttaagaagaaaggaaagctgcctttgttggcgattccgccaaaaacaaaatcaaccccagagccagcaaaccgcagcagtgcatcaaacacaccggctaaaccactaacaatcgttgttcccgcagtcgttcgcaacaaaataaatcctaataaaaattgcaaaaccagcataatcaaaatcggtgaataccgaattttttttcggtcactgctaatgacaaagctcaatgccaagataagaatcaaaccaataataccaataaaacgcaaaaaatcactcctagttcataataatatcctcattcatctgcaaaccagtaaaatgaattcgatgttcacccatatttcattttgcagcttgccgaaattagaaagctgatttcgaagctgcttcattactgcagaacgggcttcatagtttaaaaataatctgaatcagcttagcttgtttttcaaaattttgcgaagattaactatgaaaaaagcgcttctatgaacaaattctaaaaacgaaaacactaacaacttcatttttacggatttttgatgattacagcttttcctaaaaaaatatgctatgcttgaacagaattctgcagaaaaagagggatgtagatggacggggaaaacaagaagcgaatcttgctgccacgctatcagcaagtagcagtagagattgctgaacggattgcagaccagcggtatcaggtaggagaaaagattcacgcacgttcaacgttagccagtaattttaacgtttctcctgagacagctcgcaaggcgatcaatgtgctggttgatctcgggattatggaagtacgtcacggcagcggcgcatatgtgttgtcacgggaaaaagctaaagtttattttgagaaatatcaggatgtacaatcagtccaagaaatcaaaaatgagcttcaagaaagtgttgaaaaacagaaaagagaattggagcatgtgagtcaattgttgaatcaattattagctcaaactaaacgtgttcataacgttgctcctttcgttccttatgagctgaccttgaccaatgaggcggttcatttgaatagtacagttaatgagctaaatatttggcatgagacgggagctacgatcattgccattcagcaaaaggatgagctgctattgtctcctggtccatatgctaaaatttgtgctggcgatactttgtttttcgttggagacgaactggtattgcaacgaatgcagcacttgttttacccagaaattggatctaaataaatcgcacataaaagagccaatacgttggttcttttttatttgattttttactatgttagcagctttgtagcgacaaaatattaagaaatgataacgcttactatattgtgggagctatctttttactatttattcgtgacatgagagacttgactaagtctactaataattttagcgaaatggaggatttactatgcagaaagaattaccgcagtctctgaagaacgttgcagtgtttccagaagacccacgttatgaaaaagttcgctcaaatgattttaaagtaggacagcccgaaattgttattttagccgagacagaagaacaagtcatagaaacgattaactatacagcaagaatcagacaggatcagaacgagaaatttccattatcagtcagatgcggtgggcatggcttggctgctacctcagtaaatgatcaaggagtgattctggatctttcgcaaatgaatcagataagtgttgttgataaagagaaagggcttgtcaacgttcaagcgggtgctctttggagtgatgtcgcagtaaagctgcattctgatcaattagttatttccagtggtgaccacggagacactggtgtgggtggattagcagtatctggcggtatgggaaccattttacgctcctttggactaaccattgataaagttatcgaagcaacaattataacggcagatggtaaaaaacacattgtggataaagagaacgaacctgaccttttttgggggattcgtgggggcggtgggcagtttggtgtagtgaccgaatttcttttccaagcagataaggcgactgcagtgaattcgaaaattgccaatccaatgattgtacaaacgattaactactcgataacggatctttttgaatttattcaaggatggcacaattggtttaaaactgcttcaaataaattaacaagtacgttatttttaaataagggacccgatcaaacgattactgtacaaacacgaaatttttggtatggagaagaaacaagtgaatcgaagaatgtattggaacaagcgcttcgactaggtactgtttcggcaactactgaaattttgatgaactactctgatttctttccggatgagcatgctcgtattgaaggaaaaaatccggtattcgcgaaaaatacattagtgacacatatcccgcaagaaatcgcggtagaaatagaaaaactgttggagctgtcatttgtttatggtgtagaattacgagcgcttggcggcgcagtcaatgaaaaaactgctgattttaatgcgtggccctttagagaggctgaaataatgattgcttatttttttaataaggaatataccgatcaagcaattcaattatttcaaccaatccaagaatttgggcaaggtgtgtacggcgcttattcaagtgacacgagtcaggaagagaatgcgcgagtttggccaggtgcaacaggaaagaaaataaaagaagtaaaggaaaaatatgacccgacgaatctgtttgatcaaaatcgtcaattataggtgaatatctgcttcttagcattaagagggatctcaaaggaatcgttgagattctttttttgacattaaaggaagtataacattttaagcggtcaaaggattgatacatcaatcttttgaccgcttttcatctggtctttttcctattaaactggagatatgaaacccaatattttacacgccattttctttgatgaatatcaaaactgggagaaattcaatcaaaggtacacaagaaggattcgatccgttgtgaaaagagaagtgaagaagtttcgcgattgtggtgaccttaaaaaaggttatcgtctatttgtctgtgaaggatgccatgatgtaaagaaagtggcttttcgttgtaaagggaaattttgtccaacttgtgcaactggggaaagtcaacggtgggcagaggttgcggcgaatgatctgtttacagtgacgcatcgacacgtcatcttcacgatcgatgaaggtttacgtgagatttttctgaaggagaagtatcgtaaggagcttttaaaaggattaatggatgaagctgcacggatactattagatttttttagaaagcaccatatacaagctggggttgtggcaacactccacaccttcggttctcagctagaatacaatccgcatgttcatttagtcgtcaccatgggtggactgacgaaggatggaaaatggaaggactatgactattttccgttcgcaatgttgaggaaatattggcagaatgcggtcctaaagctcattcgaagaaccttatcccaatgggataaggcacgagtccagccgcttttacaagcggcgtacacgaaaaatgcagagggtttttacgtgcatgcacccaaaaggagccgaacttctctcaaaaagatattagaatatatcagtcgttatatgaaacgtggtcccattgctttaaatcgtatccttttgtacgatgggaaaatagtgatgtttcagtatcatgataaacgaactaacacggataagataaagacgatgtcggcagaggaatttattggtgcactgattcgtcatattccagagaaccagttcaaaacaattcgtagatacggcatttatagtcggcggatcaagacaatcatgaaaaaagtattaagtaattaccagaaagagattcaacgaatgcttgtgaatgtgaagaaagcacttaaaccaaaatcatggtgtgaacgaatagccgaagaattcggagtaaatccattggaatgtactagatgtggcgaatattatgaatttagtggagttagtgtgtctaaaaatggacgacttgtagtgaaatatgcgaagaataaagaatcggaacgattcatgcgagaggagaataaaaaaattggggaagaagcatcgaaacgtaagtatgaaaaagaaaaagaagcagcttttaaaaaacttcgattccaatggagtggttcattacatttgtcttgaatgtgggataaaggaaaaaattccaaaggaagtagttcaatttttggatgcaggagatgttgcatttgatcctgagaacgctccgcaatttgattgcgaaaaatgtggtggagagatgtatccagaatactataagaacgtacttggatacgaatttagaatcagtgatcgacaataaaatgatttatctaaacaaaaagtcctcaggagcggttttctcctgaggttttcttacagtgaattttgttgaaattaatgctgatttactgaaaattttctgcatctcctttgacaaagtgaccacatggtgttagtgttgtatggtcactttttttaaaggaggatattttttgagtaaagttaaggtagaacatctgactaaaatatttggtaagaagcagcaacaagcacttgcaatgattcaagaaaaccgcgataagaatgaaatcgtggcgcaaacaggtgcaactgttggtgtatatgacgcaagttttgaagtcgaagaaggagaaatttttgtcattatgggactttccggcagcggaaaatctacaatgattcgtttattaaatcgtttgatcgatccaacatctggtgaaatctatatcgacgggaaaaatattgcccaaatggataaagaggcactgcgggaagtgcgtcgccataaaatcaatatggtctttcaaaattttggcttgtttcctcatcgaacgattttagaaaatacagaatatggcttggaagtacgaggtgttcccaaagtcgaacgtcaggcattggctgaacaagcattagagaactcaggattattgaccttcaaggatcaatatccaaatcaattatccggtgggatgcagcaacgggtcggcttagcgcgggctttagctaatgatccagagattttattgatggacgaagctttttcagcattagacccattgattcgtcgggaaatgcaggatgaattattggatttgcaatcgaatgtgcagaaaacgattattttcattactcacgatttgaatgaagccttgcgaatcggtgatcggatcgctttgatgaaggatggacaaatcatgcagatcggtactggtgaagaaattctgactcatccagcgaaccaatacgtgcgtgacttcgtggaagatgtcgatcgttcaaaagtactaacagcacaaaacatcatggttccagcattaacgaccaatatcgaagttgatgggccgaatgtcgcgttgaaccggatgcgtaaggaagaagtcagcatgcttctagcggttgatcgcaagcgcaagctgaaaggaagtttgacagcggaaaaggcgcgggaagctcgtaaaaataacctaacattgaaggacgtcatcgataaaaatgtccgacgcataccaaaagatatgctggttactgatattttcaatctgatttttgattcgccagcaccgttggctgtcgttgaaggcgaccgtttagttggggtcgttatccgcgggagtgtcttagaagcgttggcagatacagagactgaagaggtgattgctcatgtttaattttttacaacaagccttgcccgttgcagattgggttgaaggatttactgattggctaacaggcacctttgcaggactgttttcagccttgcagcatgctggtcaatttttgatggatgggatgaccaatctattaacgatgattccgccattattattgattcttgttttgaccattgcagcatttttcatctccaataaaaaatggggattgacgagttttacgctgattggtttgctctttatctacaatcaaggactgtggatcgatttaatgagtacggtcacgctagttcttttatctagtgtactttctatcgtcattggggttcccttaggaatcttgatggcaaaaaatgagacagcgaaaaagatcattacgccaattctggactttatgcagacgatgcctggatttgtgtatttgattccagccgttgctttctttggaatcggaatggttcccggcgtatttgcttccgtgatttttgctttgccgccaaccgtccgttttaccaatttagggattcgtcaaattccgaaagaattggtggaagcatccgattcatttggcggaaccggcaaacaaaaattatttaaattagaattgccgttagccaaaagcacgatcttagcaggaatcaatcaaacgacgatgttggctttatcaatggttgttattgcttcaatgatcggagctcccggtctaggtcgtggcgtattgtccgcactgcaacgagcacaggtcggaaatggttttgtgaatggtttggcgttagtaattctggcgatcatcattgaccgcttcactcaaaacatcaacaaaccaaaacaacaggcggcggaaaaaatgccgaaaaccaaaaaacgtaaaatcgggattgcggcaggtgtcgtagcagcgatcgtcctgcttgcttcttttggctttggcggatcatctaatgaaaacaaaggcacgatcaatctaacttatgtggaatgggataccgaagttgcttctacccatgtcgtaggagaagtcttaaaagaaatgggctacaatgtcaagatgacgccattagataatgcaattatgtgggaatctgtcgcaaaaggagaatcggacgcgatggtggctgcttggctgccaaatactcataaatcacaatttgctcaatataaggatcaagtcgatgatttaggtgtcaatttgaagggtgccaaagtcgggatcgttgttcctgattatatggatgtcaattcaattgaagatttgagcgatcaagccaataaaacgattactggaatcgaacctggtgccggtgtagtgaacgcggcggaaaatacgttgaaggcttatccaaacttagcggattggaaggttgctacgtcttcttcaggtgcgatgactgtggcacttgggcaagcaatcaagaagaaacaaccaatcataatcactggctggtcaccacattggatgtttgctaaatatggtttgaaatatttagaagaccctaaaggagctatgggtacggaagaagcgatccatactatggctcgtaaaggcttgaaagaggatcatcctgaggcttacaaagtattggacaacttccattggacccaaaaagacatggaaagtgtcatgctggcaatcaacgaagggaaggacccttcacaggcagccaaagattggattaaggaccatcaaaaagaagttgatgggtggcaaaaataatcataattataaaattgctggtcgcattgatcagcaatttttttgttagaattaaagtacggaaccgttaataaaaggatgtaagagtagttactcaaccaatttaagtagagaatctgtcatgagaataaggtcttaagataacataattgttttaatgttgcttataaagatagtgattagagaagtcactgtacaaataaaaggtgcaggatacaaagtgtgaaatttccgaggtgtaaacagttataatggaaaatcaggagagctgtttcaaataaatgctaagcagccttttcagaaatatttcttgttcattagtgttttcatgattaatgatgaaaaaaggatgcctttaaaggatatagaaaattgattaagatgaatataagaaatagtaaagaggtcggttcaaggttgctagtgatgcttttctcagtgatttcgacaggtttagctattcttgaagttattctttgtattgaacaagcagtttagtagaaggataggacttctcaaaaaagctgagaaaaataagctgtcaccaaacagacaaggaggtgagaaaatggataagagtatgcggcgccgaaatcaattactatctttactgctttctgaaagcgattacaaaacgacggattattttagtgagaaattggaagtctcaactcggacaattttgaatgacgtaaattttttaaatcaggagttagtcaaaaaagagattgagatcgttaaagtgccacggcatggcatcaagctagtgggtaccaagggaactgtcaatcaaattggagagctggcaattgaaaatgacggggatgtttatgatgtattgggaagaagagaagccatttttcgaaagttatttatgcattcaaaaggacagttgttagaagatctagagagcacgttttttatttcggattctacgctaaaaaaagacctagactatctccagcgatatctccgccactttgaggtgaagatttctcagaaccgacgaaaagtagcgcttgctggtgcagaggccgacatccaacaagcctatcagaattttttgatgactaagtttcctgatgcgctacttgtaaataatgaagagctgctgcttcaattagagaattatttttctcagacaaagattcagttagtcaaagaaactttagagaagttttcagacatgttttccagcgatatttcaaataaatattttccagcaatttttcttacatttttatgtttactgacacgagcagaacaaggctgtcatatgactatcgaagaaaagcaaaagagtgagttggaagatttggcactttatacgcaaacttatgaaatttgtgcctttatttccgccaatagtgcgatcgaattatggtacccagacatttatcatttatccgaaacgttgtatgccatgaacttgaagccatattataaatcgactaaacgttacagcgactgttatcaagaagcagttgaagaactcatagcagatttagggaatttattaaatattgatttttctggtgatcaagagctgcacgaatccttaatgagtcacattatcccaatgatttatcgtttgcgacgcaacattttgatcaaaaatccttttatggaggaaatcaaaaaccgctatctactattgtattccatgatgtgttatgccaccagcagcttagctcagcgcttttcgattgagattactggtgatgaaatttcttttttggtcatttatttccaagtgtcattagaacgtaagtatggcgttagttttcgaaatatttatgttgttttgtctcgtggattaattaccagtgatttgatttatacaaaaattcggcgaatcattccccacacagataaagtaattcaattaactacgaaggaatttgagcaggtgacattgaattcaaatgacgttgttgtgactacggatgccacggtaaaggcgagaaatgtcgtgtacatttccccaatgattaaagatgaggaaattagtcgaatcgttcatacctattataaacgttaccatgcaaccacaaaggagaaatcacaggtccgacaccagtggatcaatcctgaacttgtttttctccgagaacaggtagagaacaaagaggaatgtttgaacttcatgatcgaaaaatatcaagcattgggaatcgcgaaggaaaaatttggtgaatcagtttgggtcagagaaaaattaggtgataccagtttttcagtcagtgtggcaattccccacgccgaccctagtgaggtcaatcaaacatctattggaattatgaccttggctaaaaaaatcaattggggcatcaacaatgtaaatgtcattctgttttttgcaatttcagatacagatatcgacgtggcaaagagtaaaatcacaggtttgcttgaattcatcgaaaaggaggagaacgtggagcagttaattcaagtaacggataaagagacactattggaattagtgatgggggaagggagtgcaatctaagtggctgacttttgggatgaaatgtacttagacgaacatttggtagatttagaaatagaggcatcagataatttttcagcgttggcagcattagcaggctgtcttgaaagaaatcaatgtgtgaatggcgaatttagtcgagcgattcaagaaagggaaaaagaattttcaactggcctgccgcttgaacatgtgggggttgcgattcctcatacggattctgaatatgtctataagcaatcgatggcaatcggtattttaaaggaacccgtaatgtttgaaatgatggggtcgcctgaagtcttggtaccagtcaagatcatgttcatgctggcgattaaggagccgaagaaacaattggaatttctccaagcattgatcgatatgttccaaaaagacgaacaagtcttagcaattgttcaagcaaaaacggcagcggaagccgtaaaaagaatgaaacagaatctaaattaaggacgtgggaaaaatgaaaaatatcttattggcatgtggttcaggaatcgcgacatcaacagcggtgaacggaaaaatctcaaaaattttggatgaaaatggttataaagggcaatacaaaattacccaatgtaagatttcggaagcacctaacaaagcttccaactatgattttttgatctccacaacggtgataccaaaggatttggactgtgaatctgtttcaggtgtgtgctttttgacaggtgtgaatacgaaaccgacgattgatcgaattttagcgttgatggaaaagtaagcggcagtaactattaggagtaataagggggaagaatcatggatgctattattaatgtgtttcaatttattcagggcttaggagtatccgttgtaatgccaattgtgatctttattattggctgtgcattcagaacaggtgttgggaaaagtcttcgagcaggtttgacggtaggtgttggttttattggattgaatttagtcatcaattcgttgttaggaacaagtctgtcgccagctgttcaagcgatggttgaccgttttggactcagcctttcaacgattgatgttgggtggccagcagcggcggcgattgccatggggtcaacagtagggctgattattatcccactagggttagttgtgaatatcgtaatgctctttacaaatacgactcagacagttgacgtggatatttgggattactggcattttgcctttactggtgctttagttgcgattattacagatacgttgtggttagggattctggcggctgttgtaaacatggtgatcattatggttctaggcgatgttactgctccagaggtagaaaaatcattggatctgccaggggtttcactacctcatggattcacgacagcctatgcgccaatcgcaatggttatcaacaaaatcattgatatgattcccggtgtacgcgatatcaatattaatatggacactgtccaacgtcgctttggtgtttttggggaacctatcttagttggaacagtgatggggatcgttatcggggccatcgctggttacgacataacaaatgttttaaccttaggggtttcactaggtgccgtattagtcttgattccgaaaatggccgctttattgatggaaggtttgattccgattagtgatgctgccagtgattttattcaagaaagatttcaaaatcgcgggaaaatttatatcggattggattcagcaattggtgtcggacacccagtgacattggcgatttcctttatcttagtaccgttattgattttcttggccgttgttttacctgggaacacagtattgccatttgccgatttggctgttatcccatggatgttcgttttgattacaccaattgtaaaagaaaatggatttagaggtttgattgtcgggctggtcgtattagtattcgggctatggatcgcaactgatttggcaccgatgattacgacggcagctaaaaatgtgaatttcgaaatgccagaaggagcttcacagatttcttctatctgtgatggggctaacccattgacttgggtgctggttcgattgaacggtctgggttatatcgggactggaattggcgctgtcgtagcattagcgatggctgtctggaatcgtaaccggatcaaaaaagaagctgcacaattacatgacggaggagctgcctaagtatttcctatgaaaaggaggaggaacgaatgaagcgatttgaatacgataaaacattgtattttatagatgttcttcttacaggagtagtctcattgatcgttttccttattgcgatcgccttaattgtcacgaatcgaatgcctgccttgatgtttttagtagggattgtcgctttttatagcttttggaatgcgctggtggccagagtaacgccaaaagaagtggatgtaactggcgatacgctaatgcttcgttctttcaatcggacggatgactatcatttgtcgcagcttaaaagctttaaaatccgcgaatttccaactgcaggaaaaatgtacctgcgaatggatggaggcgggctgctgaagggtcgctattggttgaatacgaaaaattataacgacggacaggagctatttcgattactgctagatatggagtatgaaaaacatcctgaatcgttgaaggcgcgtgctagaagggtcaatactgaatacaatactaaagtcaaaaagaaaaaagaggcaagcggatgttagaaaaagaaaaagcagaaattattgctgcaggcgtaaaattggatcgctatggtctgatctctttatccggcggaaatgtcagtgtgcgaatcgataaagaaacgctactggtgactcctagcgggatgatgtatgaagagatggtcccagaagatgtcttggtgatggcacttgatggaacaatcatcgaaggtacacgtcgtccaagtgttgatacaatcgcgatccgctacattttccaaaagatgcctgcggttaatgcggtgatccatacgcatcagccctatgcgactgggatcggtttagtagtggatcgcatcgattgcgatgttacaacacttgccaatacagcaaaggggcatgtcaatgtggcaccatatagctcagctgccagtattgatatgggctatgcggtagtggatcatattggtgatcaattagctgtcgtgttgaaaaatcatggtgttgtaaccatcggcaagagcttgaaagaggcgttgtatgcggccgtctacttagaagaagccgcgaaaacattgtatgtcgctcattcctatggcgggaaagtcgccaaactgaatgaggaacagatccaaacggcagttgaagtctttaaagattatggacaggtgaagggctaaagaatcagctgttatcatgagaatttggattttatgttgaagggacgattggaagacactttattgtgaactgtctgccgaaactcggcaggcagtttttgtgtcttcttttcatttaaccaacttgtcgattaatcaggaaaaacttattgggctcactcaggtttcagcagaacctttagttcttctccgttcatcgccaactcaaaggctctctcccactgactcaatggcagaattttggtgatcattggcgtgagatcgacatttgaggtctctagccattcaagcgacttgtaccaagagcttggtttttgagttcgtgatccgattaattgaatctctttgttcaatagtaagcccatatcgatgggaacaggattttttgcgaagagcccttcttggataactgttccctttttcttaacaagctccaatgcctgttgaagtgcttgcggactgccggagcattcaaacacttgatcaaagcctaaatcgttagtcgcttctttaatgagcgcttttagttctgttgtttgactatcaataacgtgttcaataccgagttcttgagcttttgccaaacgactgacatctttcgtaatcccgatcaaagtgacttccgaacctaaagattttacgactaaggcgagtaaaactccgatgggaccagggccaaagaccgcgatcttttcacctgctttaatggtggttttttccattgcggcatggatgcagcaagctagtggctccaatagtgcagcgacttcattcggcagtgagtccggcaggtgatgacagcggttggcttttgctgaaacaaacgttgcgaagcttccatcgacttgtgttcccagcccttttcggtggctgcagagattgaattctttcttcaaacagtaggggcaaatttcacaaacttcataggttgtctcactaactatccgatcaccaatagaaaaatttgttactttatctccttttttatagactataccactaaactcatggccgagagttaatggtatttttttgttatattctccctttaatgcatggatgtctgagccacagataccactataaattactttgattataatttcatcatctttaattgagggtgcttctacatcgcacaattctacattcccaaagccagctgataatttcctcaatgccttcaatttaatatcctcctgaattgtttattagttagaagttgttattaaaaaagtttttgttctctgtatgctaagcctatcatagatgtttagtagccatctatcacaattcttttgagaaacgaacaaaaaggattggtcttgtgaaataataggaggcagatacaattaaaagtgtagaggtgatagtaatgaacagaaggatcaataaaattttattggatattttgcacgaaaaggaagattcattggtgaactatgccaaattgtttgatgtctctgagcagacgattcgcaacgatattaaagagatcaactttcaactggaaagtaataatggaaacaaagcaatctatttggaggatggttttttacaaataccgaaggaggttaatctaaaggaattattcaaaacctatgcgtctttccaacactatcatttaaccctcgatgaaagacgaacgattctcgcgttgcttctggtcacaagtcatgattatgtgataacttactatctttctgaatacctcttagttagtcgtaatacacttgttagtgatatagaagcattgaaaaaatggtttgttaagaataatttggttttgctttcccatatcggaaagggctataaagtggtgggtgatgagcttgatattcgctcggcaatgaccaagctagtgatttttaatggactattcgattatggctatgattacgctatgggatgggaaaataatattttccaaaatcttctgttagaaatcattgatcctgatacgcgttatcaggacgtcagtcaactgttaatggaagcagaaaaagaagagcagctccaattatctgatttttcttatcaagaagtgatttgctatttaattatcatgatcgagcgcattaaatttgagcgatttattgaggcatctgacatgctggaggaaattcgggagagctcaaaatccagttttgctcaaacgattctgaaaaaaattgaagaacgctttgctatcacaacaacgaccggggaactggattacttgatttcggtgctgcgcagaaaaagctacattaaaaacaatggacgcaagattgattcgattgagattcaaattttgatcaatgagtttattttcaacttggccagagaaatggatatcaaatattacttgaatagtgatctatttgatctattggaaaatcatttgaagcttctgatctaccgtctttcattaaatgatagcgttaccaatgttttgtttgatgaaatctatcaatcatatcccgagatgtttgaaatcgttaaacgtaatttgcataagatcgaggagtatttagaggttgagattcagcaaaatgaactctcttttatcgttatgtatgtgatggcaattgtagaaaacagcaaccatacgcaatcaaaaggacagattcggctacgcattgtatgcaactctggcagcggcaccgctcaattgatcaaagtgaaattattatcagcgtttccccagattgacgttatttcagtcgattcgtctcatgtactgcaaaagattcaacctgaagatcaggatttgatcgtaactactgttccgctgcaatttgatcaatcaccggttgtcctcgtaaatccaattctgacagagcaggatatcattcgcattcaaaaagttttatacaaaatcaaaccgcgccattttattgatcaagaatatttacttaccaaggaagaagcaatgatcgaagacttcttgccgatcattcagaaatatcttgatgccggagaatatcaaagttttctaggtgatcttgagtcctttaatcaactaaatgaacgcctgtcaacggaaacgcaagaaatcaatcgattaaccgcgattttaacaattgatcggatcgcactggatcagcagtgcgactcctggcaggcagcagtagaaaaggcaggcaatctgctcctgcaggataagctgatcacccaagaatacattgatgcgatgatccaaatggtcgtggagttcgattcttatattgtcatttcaccgggagtggcgattcctcatgccgaattttcccatggggccaaaaaaatcggcgctagttttattcggttagcagaacctgtttccttcaatcatcagaaaaatgatccggtaaaatatgtgattgctttttctttaccggagggtgtctcaatcggaacgtgtttgtattattttacggaaatattagcaacggaagatttcatatccgtgatggatcagtgtcaatcggaagaagcgatcatgaaccagttaagaaaattagaagataaagtgatgggatttccttatgaataaactactgagaaaagaaaaccaaaagtttttatattattcattcgatgaggatgataaagagacgctgctcgctaaaatgagtgaggtgttgattgatgcggagttcgttcatccaagctatcaacaagccgttattgaacgggaacgtatctttcccaccggtctaccgacaaagggaatcaatgtcgcaatccctcatacagattcgattcatgttaaaaaagagggctttttagtgggagtattagaaaagccggtgacctttgaaatgatggccagtaaggatgtttttttagaggtggagcttatttttatgctggcaattaaacagccggaagaccaattagtcatgctgcaaaagttgatgctgttatgtcaggacgagcaaaatctacagttacttaaggcaaaagagaaggttgttgaggtggagcaattattgaagaccattcagtgataagaacaaggaggagaaaaaatgttagatatgcttaaagcaggagtgaattatatcttagaccttggtgcggcagcgatgttgccgatcatcctgactatttttggtgtgatcttagggcaaaagctaagcaagtcttttcgagcaggtttaacggttgggattggttttaccggattaaatctagtgattggcttactatcagattccatcggaaaatcctctcaggcgatgatcgaacgtttaggattgcaattagatattttagatgttggctggccgatcggtgcggcaatcaccttcgcgacaccgattgcagtcattttgattcctgttatctttatttttaatattatattgctgcgttttaaccagactaaaacaatggatgtggatttatggaattattggcatttgatttttccaggggcgatgatttattacgcgacagattcgatttggattgccattgtttgttctttagtaaataccttcattattttcaaactagccgattggacagcaccagcggtagagcatttctttggattaccgggaatttcgctaccccatggagagacggtcaactttgcgccgctgacttatgcgttgaaccgactatgggataaaattccaggcatcaacaaaatcgatatcaatgcaaaaaatctaaaagaacgtttgggtatttttggcgaaccgatgatgatcgggttggtcctaggtgttggtatgggtttactggcaggatatgattcacaggcgattatccagttaggcgtgcaaacatctgcggtaatgatcttgatgccgagaatggttgctctattaatggagggtctagcaccgattgctgaaggtgcgaaaacctttattcaaaagcgtttcccaggaaaagaggtttatatcgggttagatgcggcggttgtaacagcgcatccagcgattattaccgtagcactgttaatggtaccgatcacgattttattggcggcggtgttgccatttaaccgactgttgccatttgctgatttggcggtgttgccgtttactgtgatttggtctgtggccgcttcaaagggaaatattttcagaggattgctgaattcgatcgcttcgatttgtatcgttttattcatcgcgacgaatttaggtgcattgactacaacaatggcccatgcggtaggctttgcctttcctgaaggtgcaacgatgatctcagggatcgatatgagctcccacattactttatggatcatgctaaaattgatcgatccatcgaatctgccggccttcatggcaggcgccatcgctttagtgatgtacggtggactatggttctggacgcgaaatgacatcaaaaagcaatatggaatcccaacaggaaaagacgatcctgacaatacagttaaaggagccgagatgaatgaataaaaaacatatcttaattgcttgtggaacgggtgttgccacatcaacggtcgtatgtatgcgagtaaaagaggaattggaaaaaaataatattcctgcaacggttgaacaatgcaaagtagctgaactgccgtcaaaaattcatggggctgacttagttgttactactacagcttatgaaagtgatgatattcctgtgattcgcgcattatcctttttaacaggtgtaggaatcgaagcagatgcgcaaaaaatcgtggatattttaagctaggaagtcaatgatttttgtacagaagcgtgtctagcttaacgaccagctggatagttttgtacggaaaaaattttaaaaacgaaaaaggagcagacctatgaaagggaaagttgcggtagtcacgggggctgcgaaaggaatcggaaaagccattgcaaaaaaatttgcagaggctggagcatttacagtgattttggacttcgaccaaacgagcggggaacaaaccgcggcggaattctctcaagccttcgctgaatcgctcttcattaagacagatgtctcagatcccgattcattgaaggctgccagtgagcaggtggtggcgtattttcaccgtcttgatattttagtgattaacgctgggatcagttatctgcattcgataaaagaaattacgatcgcggagtggcagcgtgtactacgaattaatttggatggctccttctatacactgaaggcattctatgagcatttttccgacaatgaagggaagatcatcttcattacctccggttcagccatcacaggaactggcggtgggatgcattatgcctcctcaaaagccggacagcatggattaatgcgagcagcttcgaaagagtttggaccgagaggaattaatgtcaatgccattgctccacgagtgattcagacggatattttagatacactttatcctgatgaggcaagccgacaagagttgttgaaaaagattccgattcaacgtatcggacaaccagaagatatcgccaatctggcattgtttttggcaagcccggaaagttcctatattcatggacagattattttagcagacggtggacgaacctattaaggagaacatatgaaaaatattttagttgttacaggtacctcagagaataaacgcaattttgcagtcaattacattgagtcttttatgaaagacaaagggctgactgttaacgtggaaggaaaaagtatttacgatgtaacggaagtagcagacggaatctcagcgatcgtagcaatcggtcagccgcaatttacgacggatgttccaattatcgatggcacagcctttatcacaaaatttaatatggatacctgttgccagcaactgctggagaaaatttaagcggcgcaatttttgatttcacaacaaaaaagcagctatgattctttcatcctttcatgattaatgatgaaaaaaggttgtctttaatcaggaacaggcatccattatgataaggatgagaaggagaactaggacttactgaagaagtaagggcgttatgcttggtgggattaactgcctaaagtttaaatgctaatacctagatgtcattaggttcttatcgtgtattagaaataagtcatagtgaaaatcctccttattggtctggtttcatccaataatttatggttttcactatgaatttttttatctgctcttagataaatgccgaaataaagaagtttgtgaaggctcgtgacatttgttacggaaatcgcgtcgttggaacattttgtaaagatgagcttgtgaataaaaacatttgttgaaagcgttgactctcggagtaaagcctcttatgatggcattgtaacatatgttaaatataggaacatatggtaatggttggacgtaattaagaaagattcgccttaggagggaataaaagatgagttattccgacgacgcacgattactgacggagattgcttcaatgtattacgaagaaggagccaaacaatcggaggttgcaaaaaagttcaatattagccggtcgctggtctctaagtatttagcaaaggcgcgttccctaggattggtagaaataattattcatgatgatctggttcacccctatcgcttgctagaggagaagctggtagaaaaatttggtttgactgaggtgatttgtattgcgccggcagcggctgaaatgttgaataaacggatcggcatcgcggctggaaaatacttgtcgcgaatcttaaaaggtgatgaaactatcggcgtttctgccgggatggtcgttcatgaggcggctcaaaatttcctgccgaaaaatcaaatggaaaacattcgttttattccattggttggcgggttaggtcaggagcatacagcgttacaggccaatgtggtttgtgagatatttgcccgcaaaagcggtggagcggtgctagagctccatgcaccaattacggtagattcagctgaagcgaaaaaggtattcatggcacaatcctttatcaaaaacgtgtttgataaaggcaaaaaagcagatatcgcattagtcggaatcggcgggttaccagcctattccactatgaccaaagcatatttgccgaatgaagaggtgccattaagaaaggaattatctgctgggaatgtctcgggagatatttgctacaactttattgatgaggagggaaaacttgcggattgtacgtggaatgatcgagtgttagcgatcagtttggcggaattgaagaagattccgaaacgtatcggtgtatctggcggcaaagaaaaggttagcggaattcgtgcagcgttaaaaggcaatttagtcaatgtgttgatcaccgatgaagagacagcgaaaacgttactagacgaagataaataaaatggaggcgcataaatgatgacagcaacgaaaaacatctcgattccaaatcgagcaggtttgacggatgaaaacttagtagagctttatcgcacaatgtgggaaatccgtttctttgatgagaaagtcgatcagctctttgcaaaaggcttgatccatgggacgactcacttagcggtgggtcaagaagcaacagcagcaggtagcggagcggttttgagaaaaacggactggatcaccgccactcaccgcggacatggacaaacgatcgcaaaaggaacgaacatcaatgaaatgatggcagaactattcggccgtactactggaaccaacaatgggaaaggcggttcgatgcacatcgctgatttggatactggaaatctaggcgcaaacggaatcgttggcggcggtttcccgattgcgacgggtgcggcattaacctcaaaactgaaaaagaatgacacggttgctttggcgtatgctggcgacggttcaaccaatgaaggaagcttccatgaatcattgaacttagcttcgatttggtcattaccagtagtcttcttcattgagaataatcaatacggaatgagcggaccatttaaaactatgatgaatgttgatcgtttgtcagaacgggcgaaagcctatggcattgagggcattacgatagaaggaaatgatgtcattgaagtcatcaatactacctatgacgcggttgaaaaagcccgtcgcggagagggaccgaccttgatagaggccatgacctatcgctggaagggccattcgaaatctgacgcgaagaaataccgtacgaaggaagaggaagaggattggcgcaaaaatcgcgatccaattaaactggctcgtgaaaaatttgtagcggcgggaatctttactgaagaagaagcggaagaaattcgtctagctgcaaagcaagcgattgaagatgcagtgacttttgcagaagaaagcccaatgccagcgatcgaaagcatgtacgaagacgtttattcagactagaggaaataggatgccagttttacttcttgctttagcaagttagtaaaatggtatgcgtggtgagaatcaaacttatttttcttttagaaaaataaatacgttaatacgaaataggaggagcagaagatgagagaaatcacttacgcggaggctgtcagagaagcaatgtctgaggcgatgcgggaagatcaagatattttcatgttaggcgaagacataggcgtttatggtggcgctttcggtgtgagccgcggaatggtggaagaatttggtgaagaacgagtacgctcaactccgatctctgagtcagtgatcgctggagcagcagttggttcggctatgactggaatgcgtccgatttttgagatacaattttcagattttattacgattgccttggatcagattgtcaatcaggcggcaaaaattcgttatatgtacggtgggaaagcgaagattccattggtaatgcggacgcctggcggttcaggaacaggagcagcggcgcagcactcgcaaagtttggaaaactggacagctcatgttcctgggctaaaagtcattcagccagcgactgcatatgacgcaaaaggtctcctacatgcggcaattgaagacaataatcctgtgatgttttatgaacataagctttgctaccgaacgagttctgatgtacctgaaggcaaatacacgattcctatcggtgtagcggatatcaaacgcgaaggttctgatatttccgttgtagcaactggaatcatggtgcataaagcgttggaagctgcagatattttagcagaggaagggattcaaattgaagtcgttgatccacggaccttggtgccgttagataagcaaacgattattgactcagtggttaaaaccgggaaagcggtcgttgtgacggaagccgtgaagcgcagcgggtttagtgcggaattagccagtgtgatcgctgaagaagagtgctttgatttcttagacgcgcccatcattcgtttagccggaaaagaaattccaatgccgtatcatccagagcttgagaaaaaagctgtaccgcaagtagaagacattgttgaagcttgtcgcggattgatggcataggggggataaaaatggcgaatgaagtattgatgccgaagttaagttccacgatggatgttggaacgatcacgacgtggctgaaaaatgaaggcgattctgtggagatcggggaagcaatttttgaagtgatgaccgataaaatcgcgatcgaagtggaagcctatgatgaaggaattttactcaaaaaatatattggcgatggggagagcgctccagtaaattctgtaatcgcctacatcggtgaagctggggaagacgttcctgcggaaatgccgagtggtgaagccgaggcggcagttgaagaagagcctgaaaaggctgccgaagcggtagcggagtcaacgcaggaaacagccgttgcaacgactaaagttcgggcaacaccagcagcgcggcggattgccagagaaaagggaatcgatttgaaaaaggttcaggggtctggcccgaatggtcgaatccaagcaatggacgtgaagggatatcaagaaccagccacagctgctgcatcaaaagcggcagtgacagaaggcgagctgattccttggagcggcatgcgtaaagctattgcagacaagatgtcagagagcaaacagacgattccgcatgtcaccatgaatgctgaagttgatttaactaaagtaatcgaactgcggaagcaattattgccaatggtagaggaatgtaccgatcaacgattatctttcctagagatcatcgcaaaagcagcaatggtggcattaaaggcatatcctgaatttaacgcacatgcgtataaagaaggaattaagcaatttgatcaggtcaatcttggtgttgcggtggccgtggacgcaggattagtggtgccagtcgtagagcaagccagtcaaatgggcttaagcgatctgacagcagcggtcaaggctatgacaaagaaagctcgtgagggtcaattgatgccagcggaaatgagcggcggtaccttcactattagctcgttaggccgcagcaaggtgcaaacctttaacccaatcatcaacttgccagaagtggcgattttaggtgttggtggaagctatgagaagcttgtcgttgaagatacgccagaaggaccacaagtagcgacaattatcgcgttgaatctttgcctgtcctttgaccatcgagtggctgatggcgcaccagccgcagcgttcttaagtatgatcgttgacctgctggaaaatccaatgagtttgttgctgtagaggaggctgaccatgacgaaaaagacagatacagtcgtaattggtgccggacctggcggttatgtcgcagccattcgcgcagcgcaattaggacaaaaggtgactgtagtagaagcagagcatattggcggtgtgtgcttgaatgtcggatgtattccttcgaaggccttaatcactgcaggtcatcgctatcaagaagcacagcattctgactttctaggcttgagtgtgaaggaagcacagctggactttacgaagacgcagcagtggaaggatcagcaggttgtaaaaacactgacttccggcgttggtatgctcttaaagaaaaatggtgcagaagttattatggggcgggccacattcacaggtccgcagagcatgaggatcacaacgaaaaatggtgaagaaaaattagaattcaaacacgcaatcgtggcaaccggcagccgcccgatcgaaattcccggctttacgtttgccggtcgggtgctggattccactggcggattgaacctaaaagagattccgaagaagctgatcattatcggcggcgggatcgtcggatcggagctcggcggtgcctatcgtaatctaggatcggaagtcacgatcattgaaggcagtccgaatattgtatcgaattttgaaagtgatatttctgagttagtggcgaaacgtttcaagcaaaatggcgtagaagtctttacgaatgcgaaagccaaaaaagctgttgaaacgacaaatggtgtggcagtagagtttgaagttaaaggtaaaacccaaacgatcgaagcagattacgtgatggtaacagtcgggcgaagaccgaataccgagaacttgggcttggaaaaggctggagtcaaactgacggagagaaatctagtcaaggtagatgaacaataccgaacgtctcaaaaaaatatttttgctattggtgatattgttgagggcttagcacttgctcataaagcaagctatgaagcgaaggtcgcggcagaagtcatcggcgggaaaaatgtcgctaaagattatcgcgcaatcccagcaatctgttttaccgatccagaagtagcaacagtcggttatacgttggcagaagccaaagcggaagggataaaagctaagacggcgaattttccgatgcaagcaaatggccgcgcgttatccttaaatgcgactgaaggatttgtccgcttagtgtttgaagcggagacggagctaattttaggtgcccaaatcgtcggtgtcaacgccagtgatctagtggctgagatcactctggcgatcgaatcttatctgacgttagaagatatttcgctgacgatccatgggcatcctacattatccgagatggtgatggatgcttgtgaagttgggttaggcttgccgattcatatgtaaaaaaggttaagccggaaaaagttgcttcttagggaatatataaaacaggtgtctttctcagttttgagagagacacctgtttttagtctatttctttcctaattcttcatctttacgaatcgtagcatcgattcccttaatcactgttgagataaaggcgttgtcttctagttcaacgattccagcgacggttgttccgccgggtgagcttacgcggtcgattagctcccatggattttctttactgtaggctaaggtctcggcactgcctagaattgcttgggttgccatttctagcgcgatattttttggcaagccatttttcaccgctgcacgagcaatcgaatcaataaataagaaggtgtaagcgggtgaactgccagcgatcgctgtgaagatggagaaatatttttcttctagcggccaggctttgccgactgcattaaatagatcaatgatcgttgcgacgtcttcttttgtggcacttggatttccgcaaacagccgctgcaccttcaccgaccatcgcattcatattcggcatgacacgtacaattcgaatcggttgatccgtttcaaatacttcataaatagcctcggtgcttgttccagcagcaatagagacgatcaatggatcattttgcaggattgcgtcttttgcctctaataagactcccttaataacatttggtttgaccgctaaaattaaggtgtcgactgttttgataacttcttgcggatcactaagtgcatgagcgccgattttttcggcgaatgcttggactttctctgttgcgatatcatataagtaaatgttttctggtttgctaaagcctttttgaaccattccttcaacaattgcagatgccatattgccggcaccaataaaaccaattttcattgtacatcctccttgattttaatccgtttaactgcggaaagtgtttgaatcaaatgtttaaaatacctaaacatggtacaatcaataaagaaattatatgcttattgagccttatttaaaatagtgtagacaaagaagaaagtgtttgattctaaggtgggataaaatggaggtaacaaaagcgcagtacaccagcttctatcaatttctaaaaacattggattgctacttagttggggatggtcagatgagtgatgaggttcaacgctttgctgataatccgcagcgggaaatcgcggcctttgtaacaaaggagacaagggatcggatcgaggttcctactggtttcatacgtatattgtacgtgatgaaaggagctgtgtctgtcaggattgatggttcagaaaaggcgttgaagactggaggattgatcattgctaatgaggccacgattctttcctatcagggcaacctagaaacggaaatcattgctttttattttaaagcaggctactttacggaatcgcttttaggccagttttttgaagagccgctgctttatcgtttttttgttgaagctttgagtgttgaattgaatgatgttccacgttttttgatttatgactttgcggaggaaacggatgtgcatttttacgcgctgttgctgctgaagcaagtggttaagatggaatactttaacaataaagtgaccaaatctgcatttgttcttttgatcgtggaaattagccaagcagcacccgaacggctgatcgcaaaggacaactttgtatcgaatggacaattaacagaggaaattttaacctatgtcgatgctcggttagaacaagtgaccttagaggaggttgctcaaaaatttcattttcatccgaattatttgtcaagtctgttaaaagaaaagacggggcacacatttactgagcttgttttgtttagaagaatcgaacgctgtaaaagctatttggagcaaacggatctaaccattcaaacaattatagagcgtttggggtacaaggataaagcctttttttataaacgctttaagcagcttgtaggagttacaccgcgccaataccgaaaaatgcgagaggaagaaaactaatgtatgaagaactttttgacgacgttcatttgaccgttgtggagcagccgattgactgggtaggggaattgccgctttatcgtgggcacattaaggagttgccgtttatcacaggagaaggaccttcgaaaaaagcgatgtatcgccagttagcggaacaataccaggaatatgcagccttgaatcaggtggaggataaagaggaagatatgacctcttcattattaacaccggagcagttactgaaatattatgatggtgagaccttcgacggtttttctttaggtgatttattaaaggacgagtaaagcaagtttgtataccttttcaatgatttccgctagactaaaaagaaaaagggcgtgaagtgatgtcaccgattgaagaatacatcaatgatgctgaaaaggaccaacaaccaatgcttaaggaaatctatcaacttattaaagaaatgctcccagtcgaaaccactgaaaaactctcttatggtatgccaaccttctatttaacggaaaatttggttcactttggcgcgatgaaaaaacacctaggtttctatccgacaccaagtgcgatgtcggcatttgagaaacaactgaaggattataaaacatcaaaaggcgctttacaaattccatatacgaaagagttgccgagagaattgattacaaagatggtccgatttcgtctaaaggaagtggtggagaaaaatgcttaagggaatagagattatgctatatgtcgatgatgtcgcgggagccgcagctttttggcaggaaggattagacgggaaaattgcttcgcagcaaaccatgccggatgactctttacaggtgacggtagaattatttgaagcggttcagctggttctatttgatcgccgctttattgaagaggtgtcaccggaggtagttgataactttccttcgttgctattaaaggtaactgatttagacaactatcatgagcgactgaaaagacttagtccgaatgtaaatcctatgatggagcaaggcggaaagcgtctattcaatttcgccgatcctgaaaataattattttgtgttgagtgaatgaccttcaagtaattgagggttattttttttgaaagcataatgcagctatgaaatagcaatccgttattaaaactcattgaaacctagctgctttatttgacgaatatcatcaaactattacttgatttaagtcaaaattcttgtgaattgttgtattatcttaagaggaaaaagagctttcattgattattttatttaaaggagagtattatggtacaaattttgttgggactgttaggcgtcctattggtttattatcttttttattttgttcgcgatttgattgctgaacgtggaaactggggcggtgggaacttcttggtttctggtgtgattggttttattactgacgcgatggatacgctgggaatcggaagcttcgcgccaacgacgatgctgctggaaacgacgaagcaattagacaatgaccgtcaattgccgggaacattgaacgtttctcacacagttccagttattattgaagcatttatttttattacagttgtcaaagtagcaccgctaaccttattttcattagttctcgcagcaatcataggttcgtatgttggttcaaaaaccgtcagcaagctgcctgagaaaaaagtgcagttttatatggggatcgccttgattatcactgcggccttgatggccttgaagcaattaggcctacttgatttattaggaacaggcaatcatttgaccagcttgacggggataaaattgattgtcggtattgtcggaaactttattttaggcgcattaatgacgatcggtgtgggtctatacgcaccatgtatggcaatggtatacatgctaggcttgagcccattagtcgcttttcctatcatgatggcttcttgtgccggattgatgccggttgcaggaacaaactttattaaatcaggtgattattctcgtaaggtcagccttggaattacgatcggcggaatcattggagtgatcatcgcgacgcgttttgtcactggtttaaatatgaacgtattgacttgggttgtgattgcggtagttctttattcaggttttacttacatccgtaagggaatgcaggtggttacagggagtttgaagaagtcttagagagaaatctctagggcttttttaaattcagtgaaagaagctattcatgcattgagttttgacggataataaatgaaagaaattactgataggagacattatggatcaggagttattgattattgaattgctttctgcggcagagccgatatacaagcgagcaagaaagaatcgccaaaaaaatctggtgtatgcctttttatttttaataatcgcaagtgtgctcttttttggaatcggcagttttgtctatcagcagttagaaatgcgtgtacgctcgatcgacagcggctattgggtacggggattttatcatttttccctcgtgctgggactgcttagtgtgctcgcagtggtgctccttttcattataaacgcgattcgaggaatcgagctgcgccgttcgttccaacgatttttggaacgacaggtgaaaaaagctgcgaaatacccggacgtctatcaagatcaggaggcctattatttagcggaagaaaagcgaaagcccgtgattcgtctattaaaaatagaatgtattgaattaacgacgaccttcgacggcacgacgatctatttaggcaattatcaagagttttggggcttttctaccgttcaattatttgtggtcaatgaagaccccgagcgactgccaatgacctttccaaaagcacaggaagtaaatcagaaatgggcgcttctgatgatcagcctgctttttctaggagcagccggggtatttacgtatgatggactgaatcgtcatcaagatctttatggtggtcactcagaaccagcgaagtccacagtttcaagcgaagctgcaccactttcgagcgatgatttgatagtccagcagggaacggcaccagaaaaacggaggaatcaggccaatcaattggatttgaataatgaaacctatgagctatatatgacgaccgatagcggaagtacttggtcatttgtaccgctgaaaccagaatggatgcgctctggcagctatttgttaactagcggcgagattccgctgggctactggatggataaaacctataatattgcgccagatttttcttggtttatttattccgataacgaaaaggagttgtctttcttattttcccacgatcaagggaagacatggcaaaaatccctcgtctcagagaatgctcagaggattcgttatcgcaaggcgcagtttttcgctgatggcagcggtgtactggtttattccaatgcttcaccagaggtatcttcggaaggattagaaatcttccaaacgaatgattttggcaaaacgtggtctagaagcaatgggacaaccattaatcagccggttcaaaatgttagctttgtcaatccgacgctgggcttcgtttctactcgggagaacctatactacactaataatagcggcagttccttcaaagaagcggtcgtgacaattcccgcggattatcagaccggtggattggatcttttccaaacgcccaacgaggtgacacaggtcagtaccaatcaattagaaacgaaattctatttattgaaaatggcggggattgatcaggggaaaatgtttgcttgcctgtatcgttcttctgataatggcgagacgtggcaatttgccgaacagctatcggaagtaaagccgactgaataagtttacactctagccttttcttgctatactgctcggttacagaaaaaagatgatggagtgattcgatggaagctagattggataaaggcccgttttatcatggaacgaaagctgatttgaaggttggagaattgttggaggcgggaaaaaaatcaaactatggcaaacaagctaaagcgaattttgtttatttttcggcgacgatggatgcggcaatctggggtgctgaactggcgttaggagattccccacaacggatttatcaagtggaaccgacgggagtttttgaggacgatcctaatgttacgaataaaaaatttcccggaaatcccactcgctcgtatcgcacgcgtcagcctataaaggttgttggtgaggtaagagaatggactgagcactctgaggagcagctgcaaataatgttggctcatgtcgaaaaaatgaagcagcagggtatcgaggccattaatgaataatcgacttgccattgtcagtgtttttatctgacaatacgcagccagagcgcagcttccaactggataaattgtactttaaaacaaccgttatcccaaatatcgatgaaacgacaacccaagctttggaagaattggctccgttgtatattagcttaatttaattttacaggatcgatcgtaggttattgcggtcgatttttttgttttcttgatagctgtcaattctttctccttaggatctttgtaaactaatagtgaaaagaaaaggagtgaaaaaaatgatgtatcagaaggaaataatcgcacacaaaaaagccatcaccttcgttagtggctgctttattgtcgtagcgattgccgccaaagtcctatttcatcaaatgacagtctacgatagtgggatggcactggcatcgatttttggtgcggcaccaattgcgattcaagcatatcaagcagcgaaggtgaaggtcatcagtattgatttgttagtcaccattgcggtggttggtgcgttcattattggcgaatacaatgaatcagcgatcgtgaccttcctgtttttactaggccatttacttgagcaaaaaacattggagcgtacccgctcagcaatacaaaaactagtaaagctggcacctgcaacggcttggagactgataggaaatgccgcagaagaaatcgatattgatgaagtcgcaattggtgatcgtttattagttaaaacaggagcacaggttcctgtggacgggtatgtgatcgaagggaccggctatctcaatgaagcaaatgttaccggcgaatcaaatccggtatttaaggaaaagaacgatcaggtatttgctggaacgttcttggaaaatggcacgctaaaaatcgaagcgcaacgagttggtgaagaaacaacttttggaaaaattattgagttagtggaagaggcgcaagacagcaagtcattggcagaacgttttattgatcgctttgccaagtattacaccccgcttattttagttttagccacgcttgttgggataatgacacgagatgttcgcttagcaatcacgattctggtacttggatgtccgggggcgctgattatcggggtacctgtgtcgaatgttgcgggaatcggaaatggtgcgaagaacggcatcttgattaagggtagcgaagtaatgaatacctttagccgtgtgaatacgatggtttttgataagacggggacgttgactaacggaaaacctagtgtagcgttcgcaaaagcttatggaaatcaagcgcgtgactatttacgtttagcagcagccatcgaaagtgaatctgatcatccgctaggacgggcgattgttgattatgtagaggataaggcaaaaacagcagagatcaaagtgacggatacagtggttgaaaagggcaagggaatgatcgcaacagctgacggtgttcaattagcgatcggaaacaaagcattgatgcaggagcagagtatttcacttccggttgtcgtgaagactgatgtcgagcaattacagctgcaaggtcattcaatcgtcttcgtagcagcagaaaatcaagtggtgcaggtgatcggaatcaaagatcaacttcgtccagaagcagcggagacgctcgataagctaaagaaaaatggcattaagcgcttgatcatgttatccggtgataatcaaacaacagctgaaatcgttgggaaggaattaggcttatctgaaatttatggtgaactgctgcctgaagaaaagtcagcctttatccatcaattacaggaggctggtgaggttgttgcctttgttggagatgggatcaatgacagtccttcgattgcattagctgatatcggcattgccatgggcggcggaacagacgtggcggtggaaacctcagatattgtattgattcagtcaaaactagaaaagctggtccatgcgtatcgtctaacgaaaaaaacagtattgaacatgaaggagaacatcgcgattgcgattggaactgttctatttttactgattggtttgatttttggttatgtctatatggctagtggaatgttcttccatgaattaagtatcctagtggtggtcattaatgggatgcgtttgctttcttatcatacaagaaattcaaaacttgatagaaatcaatttgttatggaacaggactcagtagaataggagtatcaagagaaatgggggaaaaaacaaccatgaaaagagtcattattcaattaggcaccttaacgtgtccatcatgtatgcaaaaaatcgagaacgcggtgggtcagcaaaagggtgttgataaggtgaaaattctatttaacgctagtaaagtcaaagcggatcttcgttcggatgaaacgagcccggatgctttaaaaaaggttattgaagatttaggatacgaagtagaagcaatgaaagtaaaggagttggcataaaatgaacgcagaggaaacgtatcaagcagaacgaataaaaagcgaagcggatcatcacacaccgacagctgctgcgatgatcagccatattttagccaatttatttatccatcgtgtgaaattacgccaagcggagtattatttaaaaggcagcgtgcgaggttttgctgagcctagattaagaacgatgattgtcgaagaggatcagttgtttgacgaattgagccgcttggtattagatgaaggagagctcattcctacaacgctagaggaatttacgagctatgcgatgatcaaagaaagcggtcagctgaaatatgaagcggctgattatattcttaatgagctcgtcactgatctatctactcagaatttatttatcactcgtggaattgcattagctgaaaaggaagaaaagttcggcttagctgaatacctgaaaaagctttatacatgggtcaaacaccaagtattgctttggcagcgctatttaggaaatgatgtgcacgaggaatttgaagaggatgatgacgaatagctgaggatcatcatacaaactaaggagggtctccatgcatcaagaacatctatgtgtttctttagttccattatttaatcatcttgagcttgcggatcaaaaaaagattcacgcgttaatcaagcatcggattgttgataaaggggaacaggtctttacaccagacggagaagaacagctggtcattgtggctcgtggaaatataaaagtgtatcagctttcgtcaaatggcaaggagcaacttctacgtgtggtagcgcctggtggttacgaaggtgaaaatcaattgtttggtgtgcggaatgaggtattgtttggtgaagcattggagcctacggaagtttgtattctgaagaaacaagatttttctaaattgttactagactatccgcaattaagtctgaagctattggagattaatgcggcaaaaatggtcaagactgagcagcagacgcagtttttgatgatggaaaaagtagaagaacgtctagcgacttatctgctggatttggcaaaggttgctgaagcgaataccttcattttaccaatgaaaatgaaggagttggctttgttcttaggaacgacaccagaaacactgtctagaaaatttaaacgattagaaaagctgaagctgattagccgggagaggcggcaaattgttttattagataaggatggattggaagatctataaagagactaactatatagagtcaagtaaaaattagccaaatcaaaaaatattttataacagataattccgaaaaaagggtacaacaaataagcttcttaccattagtttttttgaatgttcaatagctaatcagaaacaattatataaggctcgtttttagtcaaaatagcatgaatcacgtaacaaagcttacgagaaaccgcacctaaggcagttagatgatgttttccttcggaaacttttttctggtaaaacgcactaaaaacaggatcacattgagaagctactaaagccgccgaaaacaaggcttttcgcaaatatggagaccctcgtttactcataacattatgcgttgcctcatattgccctgattgtgtcacggaagcgtctatcccagcgtaagcaacgagttttttcgggttagaaaatttttgaatatctccgatctcaccaagaatagtcgcaccgtttataggaccaattccaggaattgtgagaataacagaatttaaagtgtccattatgtgcttgatttctctttccgtttcctttatttggctttcaatgaattttaattgttcaatcattgaacgtagttggaaggtgaacgcttcttgagcaaattttactccaaaggagttagaagctgcttgcttcaattggtccgctttttctgccttgattcggttcctgcttaactcagctaagtattgggccaaagtttctgaggaaatgttttctaagtcgatcggggcactaaacgccagcaataactctttagaagcttttccgaaaacgccctgcttggtaaaaatcgtcgcgtattctggaaagacttgatccaatacggctataatttttcttttgaagtcgctcgctgtacctactaaataagttcggtaacgagaaagttgtttcaaagaaaaaacattttcatcggataagaccgtttcgacaaatgagccatagcgcattaagtcagcaatcaaaacagaatcaataatatcgttttttcgtttccgtatttctgtacctttacgccatccgtctgtttgaaggggattcacaacgtgaatcaaataatctgattcgtgaaggtatgaaaagatggacagccaatagtgccccgtggcttccatccctataacaaagtcactgggtgctccggaatagtcgaccattcgctcaattaatgactctgctccttcagtggtgttaggaaatgaaaaaccttttagtaatacctttccttcctcgttcatgatagaagcaacgtgagtgcgtttaccgatatcaatgcctaaaaagtacatgtatatctgacctttcaaaaaaagaattttggattgaaatccactcaactgaaaagcgtcactaccttgtacgagatacggagtaaagtaaggactttcaacatctaactcatacgcaatccacttatcagagagaggagccagtctctcgagtgcgggttcaatgacccaaggggggaacggcttagcctctcaatccaataaatatattatctcaaaagaaatgagttaataccaaattaaaataacgatggttcatagggttatccaatcaaaaccggaaggttaaaaccctaactctaatatacggctcttcgtcaaatcgtgttggtgaagacaaatttgaataaaacttagtccgatatgcggcgcgttctgtgcgccgcatatttttttagttttcaaagatcagaccttgttgtaaatagatccgtgcccgaaagttataaaagttgcgataaccaaacgcaattcgtttaatcagcttgatcttgttattcagcccctccgtgacaccgtttgagtgggacactttaaaggcatttgaaatgcccgattggtagcgatggaagatcgtgaatttctttttaaacgactgaggtaacgtagatgaaattgttttaagggtttcttgaaagccttccgtatctcgtttaacgaaataatagcgtaataattgacaaaaatgatacgctgttcgcaattcttcgttgtagcttaacagttcatcgacgatttctgtttgactaattggtcgtttaaacagtcgatgataatgccgtttgagtggctccaatgtcgtggaatctttgagtaagagtttccaatatcgcttgagccgacggtacttcttctgattttcagagtgtgaggttcgaaaacgattcatgatctggacacgtaattgattgaaactgcgattgatgtgttggacaatatgaaagcggtcagttacgatctccgcatttggaaagaccgttttaagcaactgacaatagctggcattcatgtccatcactaggtacttgacctttaaacgggcctttctaggaaagcgcaggaagtattgagttagtttgtaaagtctgcgatcttcaaggatcgtaaatagctgattggttgtcccatcaacacaaataaaactcatggaaccagaaacagacttcattgatttgaactcatccatacacaacaccgtcggaaggaagttcatacgtggctggtaatgcttcgttgcttcacgcaagatccgtgtcaccgtcccatccgagacgaagtacttcttagcgattagtttacgtgattgattttcgtacagttccatgagaatcgcctgcttcagttcctttgttagttgatgatgttcatcaactaagtccgttttcgcagaaaaggtccgtccacaatcatggcagagaaaacgggtacgttttaattctaaaatagttaacttttctttgactttcaacatctgagtgcgtgtcgtataggaaccgttgcggataatacgaaccgatcgacagtgttcacaacaggaaggagagtcatccaattttcctttaataaactgcgcttgaacgcctttatattctttttcaatcagccattcttcatcaaaaaataaatgtttatctgttaatccgagtaattttctagtatgattatccattgagagactcctttggtagggtgacgttttggtcgactaaattttaccaaaagtgagtctctttttgagttgaaacgaagaaaaaagtgttagtagaaaatcgccttcgattttccaccaacacaaaatattatagaacctaatatacaaggagggtgtgacaagtacttttgccacaccctcctcttttcctgattattcaaatgcttggttgacgtcttcaagcatcattttaacggattccaatccgccaccgcttaggtaccaaacatccggctgtaatgaaatgacttttttgtctttgccggcagttgtttgagcgactaattcattgtcagcgacattattattactgtcatcgccaccgattgctttcgtccgatcaacgacaaacaatacatctggatttttatctaggacatattcatatgaaacgctttgaccatgtgtagaggctttgatggcatcatctgcttctgcaaagccgaaggtatcgtaaacaatcccgaagcgtgaatctttcccataagtagacaattgaccttcgttaacaagcacagtcaatgctttgtctttactttcaacagctttttctttggtttctttgatgctggtttcaagcgctgctaattgtttttcggcagctttttccttgccaaagatttttcctaaggtttcaacattttgtttgatagaattccaggtatcagaagtgtccaccgctagatacatggttggagcgatttcttttaattgttctaaaaagtcgctttgtcggccagagataatgatcaaatcaggtttcatttgattgattttttctaaatcaggttccttaatcccgccagctgaatcgaccttcttatagtcatctaagtaagcgggcaaattatccgttgccgcacccacgactttatcacctactcctagtgcatccaaggtatctaaagacccgttatcgaaaacgaccacctttttaggattctttggtacagttacttttccgttggagtcattcacttcaagcgtctcttctttggctgtgctgcttgtcgctgctttccccgtcgaatcgctgcttccttcattatttgtcgaaccgcagccgaccaatcctaaactaagcaacaccatcgataagccaacaatatattttttcatttctgtttcctcctaatttattattaaattcctcactgttaaatgaggctaaataccatgtttaattgaaatacatacaaaagcgtttgccgtctagttcacagatttttatatccatttcgtataatgcgttcaatatttgtggttggattatttcttccattgatccatgagcaaaaattccgccattcttcatggcaacgatctcatcagcataagtcgccgcgaagttaatatcgtgaatgactagcaagattgttttgtgttcttcttctaccaagcgtcgcagcgtcttcattagctggacggagtggttcatgtcgagattattcaaaggttcgtccagaagaatatattcggtatcctgtgctaagatcatggcaatataagcacgttgcagctgacctccagataacgtatcaattctatcttctgccatttcgactaaaccgagtttttctaaggcatagtcgatcaattctttatcttcgctagttagtcggccttttgaataggggaagcggccaaagctaacgagttcacgaacagtgatgcgcagattcacgccgttgctttgttttaggattgataattttttcgacaattcattggagcgccaagctttgacctcattgtgatcgagataaatttgtccggcatcgatagagatcaaccgactgatcatcgacagtaaggtactcttgccagcgccgtttgggccgataaaggccgtcagtttttcttcttcgattggcaagcatacctcggtgaccacctttttttcaccgtaattctttgacacttctttaagatcaatcatcgttgtcgtctcctctcataaatgattttgcctataaagtacaagccgccgacgaattgtgtgacgacactgacagttgtttttaattggaaaacttgttcgactaaaaattgactaccgactaaaaagatgattcctagtaaaaccgcggtaggaaacaaataactatgacggtaagtcggcatcagctgataactaatattcgcgacaataaatcctaaaaaagtgattggtccgactaaagcagtcgctgttccagttaagagactgactagaaataaaatcaaaatctgaaacttttttagtggaatcccgagattcgttgcttgatcgtctcctaaatgcaggacatctaaatagcgattagcagccaataaaaccaaagagcccaacaggataattccggcggccaaccctaaatgtgtcgtattgatattgctgaagctggcaaacagtcgtccctgcagcaaatcatattcatttgggtccatgatgacctgcagaaaattactcgtgctgctgaataaggttcccaggatcattcctaacatcaataggataaatagattattttgctgctgttttagcagaacattagctaagagcaaactcaataaagccatcaaaaaaatgctgattaagaaagtagaggtttgttcttgtgagagcatgttgacaccacccacgaaaaagaacaatagtgtctggatcaatacatataaggaatccaaacctagaatattcggcgtcaaaaactggttttgagtcagtgtttgaaaactgacagttgctattccagtcgctaatgcaacaagtaaaaaggccgctaccttttttcctcgcagcatcccagcaaattgaaaattgccataggtattataggttaagtaaagtccgcataagagtagggcaaggacagtgagtccagctaaaagcaattctttttttggcagagaaaatttcatgcacgtttcctcccaaccaataagtaaataaagattaagctgcctaaaataccgaccgtcaagctgactggtatctcatatggtgagatgacgatgcgggagagaatgtcacagaccattaaaaatagactgccgctcactgcggtaatccatagattctgctttacatgatctccataaataagcgaaacgatattcggcacgatcacacctaaaaaaggaacggtccccaccatgattaaaaccagtccgctggctgctgcaacgagaccaatcccaagcgtttggatcaagcgataatttacgcctaaattaatggcaacatcttcgcctaagccaacaattgtgaaataataggcaaataagtagataaccaaaaacagtggaatcgttagataaagcaattcatagctgcctttagccactagtgaaaaattcccctgcaaccacgaagacatgttttgaatcagctgaaactgataagcaaaaaaggtagcgactgatccgacaatattaccgaacattactcctaataagggtaaaaaaatcggctcctttgttgggagcaaccgacttaaccccagaaaaaccatcgtaccaagaaaggcaaaaataaatgcggccaaagtccgaacagtcgtagaagcattaggcaaaaagagcatgaccaataaaattcctaaacgggcactatccatcgtgccagcagttgttggtgaaacgaatttattttgtgtgagctgctgcataatcagaccgcagatactcatcgttgcgcctgctaaaatcaagctgacggtacgcggtacacgtgtagtagcaagaatcagccactgttgtgaatctccttgaaataaagcctgcagcaccaaatcttttactccgataaaaatagagagagcgcttaacaaaaataaaaccaaaagaatccctatttttctcaataactcatctccttatatagttgataatgattctcattctctctggttataaagtttaggtgaaaaaccaaacaaatgcaagtgatttttaatgatatttttttaagtgagttgttatgaatataggaggtattttgaagagaacaaaggggagggggagactctagctgaaatgaggcttccaaacaaaaaagactgaggaatgattctcagcctttagataaaagtattatttctcttttctgaatgtgaccaatatcgcacttctagtggcgataacatttggcatgtatgagtgggtcacgaactcccaaccttcgttagcccgactattaatcagatcgtctaaccgctctaaatcttctatattggcgctatctttaaaccatttcactgacgtttctaacacttcacttctgtatgtccacatatttcattcctcctactatcattatatatggagaaaagcaagaaggctctaaacagaaatgattgtttcgaaaagtccgtaaagtacgaggatattgatagtaagctggttatttagaaactatagtttccagctttttttagtctctgtcagtcagcatttgtttatatatggcttgtttattttccaaaaaggctaggtgttcgtcgatttttcgtctgtcagacaatagacgatttctttgagttgctaaaagcttcatgcgcttttcaatcgtttggtctccttgactacgtagctctgagtatttttggatcgattccagaggcataccggtttgctttaatcggtgaatgaaacgtaaccattcaatatcggcttcgctatattcacgataaccgtttttattctttgcaggagcactgattcctagctcttcataatatcgtagggtagggatactaaaaccagttattttggcgacctcactaattttgtacatcaaaattctcctttttcatagtgattaaaaaaatccttgctgtaaagcctacttgatagtttatagtactttaccataaaggaggcaggaactgctatgactgataaaagattggaacaaggaattaaaaatttgtaggagattgatggggaagccggagaacgagtgattgagagtctcgaaacgatcgcgccggatgtcgggcgctatattttagaatttgcttttggagatatttataataaggataccttgtccttccgcgaacgggagattgttacaatcaccagcttattgacccaaggagatacgaaaaaccaattaatggttcatattaatgggtcattgaatgttggtattacagaagaagagattatcgagatttttactcattgcatcccttatgtggggtttccgcgagtattgaatgcaatcacaagcgccaaagaagtttttgcgtctagaaacagcactttagcatgattgtgaccatcattttttcacaagctattgacattcccctatcaacttaggtaccgttagaatagtacgaatgaatgcgttatcaaaaagctagctatgaattagtcaagtgaaaaaggaatttcttttatctttaagaaaacacaccaaatagacctccaaaaatcgaatgaaaaatttatttttcggagatatcttcgggaaaatgaacttcgtaaggtttgttttgtgtccaaacggcaaaaatgatattcacgagttttctggcaactgcaccaatggcggttccatgtgactttcctcgttttctcaatttttgataatacaaggaaagggcaggatctttaaatgcggcgacaaaagcagcttgccaaatggctcttctaagataaggagaaccacgcttagaaagtctgtttttggttcctgtaaaatctccagactgatgaacagaggcatccagtccagcaaaagcaaggagctgattggggcgttcaaaacgtttgatatccccgacttctgccatgaggacagcggcagtaatgtcaccaatccctgtaatggtcgtcaaatagttttcttgttttgaaacgatttcttgaatttctgcttcaatgatcttgatttgagaatcaagcaactgaatctgttccaacatgatttgaatctctaacttgaagacatcagaagcaattgaaatgccaaaagaatgtgccgcagcttctttcaatttcagcactttttcttctgagcgagcgattcctaaccgtttctcacttgcggtattgatggtttcaatgagacgttcggcatcaatctcaagaagatcttctggaataggagaatttagtaagacttgcgtggaagaacaaccaaacacatccgaaaaaatctgatcgtattcaggaaagacctgatctaaacaagcaagaatttttctttttaagtcagaacaccgatccactaaaccatagcggaatcgttccagctgtttcaatcggaaaatatcttctgcgggaagttcggttttatcgggcaagtccaatcgaatgacttgggcgatcaataaagcatcaatcgtatcagtttttgttttccgaatgtaaaaatcgcgtaatacatcggactgtattggattgaaaacagtggtatgaaagcctagcttatgcacgaaagtgtagatggacagccagtaatgaccagtggcttccattccgaccatggtgttttctggaagtaacgcgtgtttattgaagaaagcaagcagttgttcactgccaaatttggtattggagatacggatggtttttccgatcgattttccgtgttgatcaatcaatccaacttcatggtgttgcttaccaatatcaataccgagaaaaaacattcaatcagatcctttcaaggatttgtcagatagcggttatcctctctgctcttggacgatatagcctcgttagatattcagaaaccaggttctatctagctcattcatatactgtcgcaagagaagaggcgtcagtctttttgaggaagacaaggcttcaaggaggaaaactacgacctctatctgcttactacaagtttaaaccaaaaagaaggtttaaaggaataaccagtcagaatgtatctgacaatattaatatacgaggaggaataagttatgtttgatttgagtggaaaagtagctgtggtaactggtgccagcagcggattaggtcgtgatgcggcgattgcgtatgccgaagctggagcagatgtggttttattagctagacgtttggaacgtttagaggcattggcagaagagatcaagaagatgggccgcgatgttttggcgatcaaaatggatgtgacagatgaagaaaatgttaaagcgggtattcaacaagcctacgatcattttggccatctagatattttgctgaataatgcagggatcgcggtgcatggcggtgtagattccttaaccgtagaggccttcgataaatcaatggacgtaaatgtcaaaggaatctttttagttagtaaatatgttgttcagcacatgattgaaaataaatacggcaagattgttaacgtagcgtcaatcaacgcggtgatggcggacaaagccgatatttttattcgccactcatacaatgccagtaaagcagcagtcgttggactaaccaaaggaatggctgccagttacggaaaacataatattaccactaatgcagtagggcctgggctgttcgaatcagaaatgactgaggataccttattcaagtcggatgatttcttgactatgtacaacacgatgaatccgatgagtcgcccgggaagacgtggagaattgaatggaacaattctttatttctcaagtgaagcgtctagctatacaaatggacagttcatcattgttgatgggggaacatccatcgtttaaatcaattaacggagcactttctcaaaagagagggtgcttttttgtcgctcatcacagcattttaacaagatcgagtctctttcgttcctatttttgctacaatgagcaggtacataaacaattgagcgattgattaaagaagaaaaatcaaggaacagggaggatatacatgaagaattgccctaattgcgatcatgagaatttgaccgatgcgcgtttttgtgaagagtgtggtcagccttttacgatagaggtagctgaaagcaaaatccaggattttcacttttgttccaattgtggagaagcgatccaagcgaaggcagtcttttgctctaattgtggacaacagctaaaattgtcccctaactcaatggttaaatcgagaaaagaactttcaagaaaacaaaaaatggctctttgcggcatacttgcagtaattgtgctacttataagcggtcttttatttggttgttattattatagctatccgcagcagttggatcgcttagcccaaaccttcaaaacacaagacccaaagaaaatctcggaggttgtcacgtcagaagatcctaactatagggttactgcaggggagttgaaaaaatttatcagctattatcaagaggagaatcataaaggtgaatttgctgattttttgtacgatttgaaaaataatccgggacaattagcagatttttcacttcaccaaagaggaaggtacttcggggtattcccacgctatcaattagtgatccagcctgtttatttgacggttacggcagatcaggcggatattcagttagcacttgatgataagaaattagcgacttcaaaaagcggcaattatcagataacttggggtcctcttacacctggaagttatcaagttgcaggaaaatcagatgatgtgcagtctgtatctagtcaaaggctgattcgctatcagaatcctgattttgagacagatagccatgttactgtcagtcttcataagatttccttcaaagttacctcaaatagagatggtgcgaacgttttggtaaatgatcaagctgttgctacgatcagaaatggacaggcggagatcaaagatgtggtctggcatcaggggttgacgattcaattaagcgttaaagacaaccaggatcaattgaaaagtgcgacctatcaaattgccgctggtaaatatttagcggaagagtatcatgcgcatcgccctgaatcagaaatcaagctagatttttaactaaacctaatgaagcggactgatcaaatcgaatgcttcatagtaatgtaacagatgatacagaagaaaaggagtgcctaaaaaaattaggcgctcctctttttgaatcaatagcatttggcgcaggctgttaacccgcgagcttgagcttcttctaaggtagcaggggagtaggtaccgttgccgcatttatgagtgtgatatttgctgcctgtgggtgtaacgtaaaccgtttgtccttgagcaggttcagcagcctgctgagcctgggcctcttgctgagcacgtgcagcttcctctgcttgagcttgcgccgctgcttcttgagcgatgcgttgttcttcggcctgtttagccgccgctgcttcttcggcgatgcgcttttcttcggcttttttagctgcttccgcttgttctgctgcacgtttttcctcggcttcttttgcctcttgttcctttttctgccgttctgcttcggcttttttggctgctatttcttcttccagtgcttttaaatgagccgtcactgctgcttgattgtaccctttatcagcttgtgcgtagttttcaatgctccaaatattttgttttcgttccttggcttgttgctctgcttttttgatcttgtcttgatatttcgtatttttacttttcgtactgcgtaccatccccaagccttcattagcaagggtttcttgtacgagtttgccatctgcccaaacataaaccagttctctttttttactatcacgcttcttgcccttgtcgtactcgatctgaattttttttgcacttttcaacagttcttttgtccgatttttggcttcttttgcgtaaggactctccttttttagctcaggagtatcaatcagtaaatatttagctgtaatgttcttaccatttttcagtttgaagcgtgttgtgtcaccgtcaatatatttcttgacgttgaccgtgattttcttgttggcagttcgtttaatctttgccttttcctcagtctttgttttagcagcctctgcttgatactgtggtgtcggcgtagaaaatagaaaactaaataatagtgcaaatgtaacccccagcttaaccccaatctgctttttcatttattatcctccttctataatttgtttaaaaataattatttaaccatgtaggtgtacttaaatgatactacatctttttataaatttgatattaaatcaaactaaataattttttagaattttaataatcggatattgagataggcacatgtttttaaatgactaaaaaagttatttagattttccaagataaatttcaaaaattaagcagtctaggttctgaaacacttccagccatatacgtgtttaggttctactcattggacaaattaaagatcttttcattttgtaaaatgggctcttatttcttgaaaatagagttgatggattattgttaggtatctaataattagaaataaaatttttttattgacaattttttttgaagcgtgtatattcttttcgaacagttagatacctaattattttgcgaaggaggaaatcttttggataaattggtcatttcaaatttgctgcgttcaattatgaataaatctcgcgaatcgatagagcaacgtgtcaaggatatggatatcagcccgcaacaaggacggatgatctcttatatcgtgcaaaacgaagacaagggattgattcaaaaggacttagcagaagtatttcaacgccgtggagcgagtattacgagtatgttgcaggggttagagaaaaaaggctacatcgaacgccggattccagaaaacaacgaacggcaaaagaatatttttgtattacctaaaggaaaagcattggttgacgaaacaaacgaagctttttacgcagccgagaaagaattggtccacgcattgaatgaagacgaagtccaacaattgacggagctgttaagaaaaattgatcgaagcctttagtcaacaagcagctttggcttgcttgtagcaaaatagttagaattctaacatttaaaaatctaacagaagaaggaattaccatggaaaaatttgaagtgaatgaatcaaatatttactacttaaaagaaagcccaattcgcaaagccattgcccatctatcgataccaatgatggtgggaatctcagcgacaacgatctacaatttgatcaatgcatatttcattggtttaatccacgatacgaacatgatgtccgcaattaccttagcgatgccaatcacgattattttaatggctgttgggaatatgtttggagtcggtggaggaagttttatcacacggctgctaggcagcggtgatactcaaaaagggaagaaagttgctggctattctttctacgcaagtatcattctaggaataatcatcggcatcgtagcgatcatttttataaatccctttgttcatttgttgggtgcagatagtcaaacaatactttacaccaaacaatatgcaaccattctatttgctggtggtgccgcgtttatcctgaattttgctttggaacaattagtacgttctgagggtgcgtcaaaagaatccatgtatggcatgtttatcagtgttgccgtcagtattgttctggatgccttgctgattttagtctttaatctgcatgtgatcggtgcaggaatctcgattgtgatcgcaaaccttgcatcaacaacctattatgtatggttcttggagagtaaaagtgaatcattgaagggcttcttaaagcatttcaagctctcgctcaaggatcaattagaagtctataaaatcggtgtttctgaactgttcaaatcagcatttatgattatcacaactctattattgaataatttttctgttcaatatggagacaatgttgttgccagctttggtatcgccgttcgcattacacaattgccagaatttttgacgatggggctatttttaggtgcgatgccgctattcgcctatagtttttctgctcataatacgaaacgcttaaaagagtcgttgaaggaagtttcattgtggatcggaggtatctccattttcttcgcactcattgtttaccttttccgagtgcctgtattgggcttatttactaatgacccacgtgtgatccaagttgggttaacgatcttggttgcgcaattggtctcttcagtgtttaacggtttttccggtctatttaccggcatcttccaggcctctggctatggatttcagacaggcttaatgtcaacgatccaaggcaccttttttattccagttgttttgctattgcatcacttctacggattggatggcttgatctggtcaatgacaattacagaaggtatcgcctttgttgctggtgtgattatgctgattccttacttgaagaaattaagtaaaaatgaactgccagctttccaggagcaataataagatgaattaaagaaatacctcgatattttgaggtttttttttgcgagtagaaaaccatggtattactgaaaagtattcttttaattgtcattttcgttattaacaattaaaaagtagggttttgtaaggaagtaattaagctgtcattgcggtattatttaaaataaggattatttaataatatgcatttttgttagggaggaaaaattgatgtcaacacaaccttgggcactatctcagctacaactttttgtcacaaaacgggaaagattagaaaaagcaataatgaaagcgtatacggattcgcgtgacgcggatacggttattcaatacgttgttgctgtccttgtacgaaatgcattgtgcatttcggatttttcactgatttgtcaggatctagtccgagagattctgctatttgctgagccgacggacgtgttgcgtaaatttgccccgctgtttcgagaattctttggtagtggaaaagaatgggagcaggtgactaggcgtttatataaaaaaacaaaagaatatcatcgctacaataatcgtgtgagtgattgtaagaaatacttatttgcaaaaacaacccctatcgaagaattaaacggtcaacaatataaactagtctcgacctttgaggatgcgattggaaagattcatacgtggagtctgcgggatgccgataagaatgcctcagcgatgaaaattgatgccgtattagagttgttgagctcattatcgatttttgaaaaagatggcgttcgtcgattcgtgaagctggaaaactctgaaattgacaattgcacccgccatcttaaaattcgcaaaggtgaaattgtggaggagtcagcgcaaacttcagcgagtcagacagaagcagcgaaacctagttttgatttcagcacgatgagtgaagaagaaagactacaattagtagaaatgttactacctgaaggcatcgtattagctgatacacgtagtgaaggacataaagaaaatcctgacaatgaagagataagtctacccgaaaagtccatcgccacgtcgcaagaaccggagtccactagcggggcagtaacttctatagttgaggaaacgcctgagcctgttgaggaaaacaagaaaacaaagaatccgcaatcaatctacaaaaagcccaaaagcaagaagcaaatagcgatagaagaaaaaactgatttaatgaaaagaaagaataaaggccaaagtaatccaaaaaaatcaaaagatcgtaagcgtagacgaagaaaatagggcggtaaattttattggcttaatcaaaaaaaagcgtgctattttgcacctttatttgttatgggcaaataactttagagttaacctgaataacttcacattgccggcaatctgtcgaccgttgaaaatcggaatttcctgtagttacgacagcagtggcaaagtgttgagatgacaaggtttttgattgaaatgattgttatgattgcttagtaatgagcatctaaagcagagatcgacagaaataggttactaaagcctagtggtaacaggtataatttaagatggatctaaatctaaaacagtggaatgtaaataaaggtaaaaatatcggtaacagccaagtcctcccgttcaaatctaaaataatggagtataaatactgtagtatagattcctgtttactggcaaacatcaatccaaatccaaaaaggattaaaagaccagttgatgacacttactatttgaaaaccaaacaaattaaagaatcaaacccttgtccgccgcccttcccccgaaattttcccaaaacactttccaacatcggaaggtgtttttcttttcccgttcttcttttattcctaaactctgcaacttccgtccgaaaggttcaagttatttgctagaattaataatagaataattatttttcatgaggagaagacttatgcaggagaaaactaaggtattgatcattgatgatgaccaggagctttgttcgattatagatcgctatttaaaaaaagctggttacgagacgcagcttgttcatacgggtgctggtggtctacaattggcactgtcgggtgattatcatttgattgtcttggatatcatgctgccgcaaattgacggcatgagtattttagcggagatccgcaggcaaagtgtggtaccgatcttgatgttgacagctaaaaatgaagaggcggataagattcggggactgcaattaggagcggatgattatttgacgaagccttttagcatggcggaactgatggcgcgggttgagtcattggttcgacgctatacgaaatttagtcgagtagctgttgatgaaacggcgttagtgttgaagcatttaacccttgatagacaaacacgaattgttttattggagggaaaaccgttagagctgacaggaaaagagtttgagctgttatattttctggcatctcacaaggggcagatttttacgaagcggcaaatatatcaacaagtctggggcgcggagtatgcctttgatgataacaacattatgtccttcatcagcaagctgcgaaagaagatcgagccagatgtagcgcagccgttttttattcaaaccgttcgaggtgtgggctatcggtttaatcaggagggataaatgatgttggtgttgagtataatttgcttattgctggcggtagtatgtttgttgctgattgtgaggctgcggcaaaatagacgtcagattgcacaagcaatggttgtattagaggatatcggagaaggcaatctcgatcgaaaaatagttgtggatgaaaactctgatatagcggcactttgttttcggttaaatgagattgtttcagaaattaaacagtagcttagccgcttacgggtttcggagaatgaatatcgcaagctgatcactagcttatcccatgatgttcgaacaccattggcttcattgattggttatttagaggcgattactgacggtttggttacagaagcggagcagcaggaatatttgcgggcagctcaggcgaaagcttttgaattagaaacctatatcgacacactttttgaatgggtcaagctcgaatctggtgaacggcattatcactttgaagcaaccgatatcagtgagctgttaagagagattatcagtgagtggattcctcgaatggaacagcagtttagttttgatatccagattcctgaaaaggaacttagttgtatgattgatacagccgcatttcgccgaatcattgataatttattggaaaattgcttgaagcacagtcggggaaacagagtgacgattagattatttgagcaggatcagcaagtacgactggaaatttccgacaatggacgaggaatctcagaacaatatttaccaaggatttttgaccgtttatataaaggcgatgaagcgcgcggttcgaagggcaatggcttgggtctggcgatcgtccaggaattagttaccgcgcatcatggagaaatcaacgtttgcagtaaattaggtgagggaacaaaattttacgtgacgttacctaaataaaccagagaaaaataaggattcggcaaggttaggacaaggtagcgctgctaagctaaaggtatagaaaggatggtcgctatggaaaaatttgttgtaaagaccgccgcgctgtcgaagcgctacagcgttcagatcgttgtcaaagatgtatcgatgtcaattcctaaagggaaaatctatggacttttaggtcggaatggtgcagggaaaacgacgatcatgaaaatactgttaggtttagcaagtgcaagctctggggaggtccgattgtttaaccaatcgccaaagaagcatcctgaagtgtattcacggatcggaaacatgattgaaacgccaagtttttacccttatttatcaggtccagaaaatttaaatgttttttctaagctgaaaggtcagattcaaaaaagcagtgtagaaaaggcactgaagttggtagatttatctcgagcaggtcacaaacgttttgccaattattcattaggtatgaagcagcgtctggggatcgccaatgccttgatgaaagatccggaattgttgattttggatgaaccaacaaatggtttggacccgatcggaatcgctgaaattcgtaaactattgaaagaattagtggaggttcacgggaaaacgattttaatctctagccatcaattgtcggagattgagcaaatcgctgatattattggtattttacatgatggtgcgttgttagaagaatgtgacatgagccagattgcgcagcataatcaacgcttcatccatattaccgtatcagatgtacatcaagcgactcgcttattagaagaggaaatgcagctaactaattatttggtcgctgaaaacaatgcgatcaaaattttcgaattcacttacgagccgcaagagatcaatcatttatttgggaaaaatggaattaaggtttcaagtttatttatcggttcgggaaatttggaagagcatttccgagagattacgggaggtgttggcattgcttaatgtgatctctgctgaatggatgaagcttaggagcaacagaatctttaccgtatgttctctgctcacattactcacctcagccttcatggtatttagggatttggtcattgttgataatccacctgaaagttaccaaatgtggttgccgagtatctatatagttgtagggatggttttatccattatgagcggcttcattattaccttcttgatgcagcgtgagtatgaagatcgaaccatcaacaatgtattgaccgcaccaacctctagatggcgatttctttttggaaaattagtgatttggtttatctggtatcttgggacgttgatcggtgtggttgccatttatacgattggcggctggctgatctatccggatacttttggtttaactggaacaaaaatattggtttcgaccttgttaaaatactgtttgcttggatttgttgctgctatccctttgttaacgattagcgttgtgcaacggaaattattttacccaacgatcatggttgcgcttgtttttaccggcatccaaacgtttgcgttgaatatccccttcaaatttgcgcgaatcattccatggtcagcggtggttgttcaaagcttgatggaactgactttaaaagatgatctattaacgttggggagtatttttctgacaggtatcgtgggtttagtggcggcttattggttatttaagaaacaggatttgtaaaaaaaggtttcttttgtaggcagcgcacacctgaaaacgctatactaggtatatcagaagaatgaataagatagtgaatcattctaacgtacaatcaaggaggaactatggagaataaggtgttgcagcagcggattgaaacctttaaagtgttcggtgagacgttaaagggtgcgaaagtctattttcgcgaagattggggagtactttattttgatttgcaggggaagatgtttggcatgatgagcaaccaagcaagtgaggatgccatcataacgctgaaaaatctacctgaaaaaaatgaagagctgcgagaaatttatgttggtatagtgattccggggtattacacgaataagaatcactggaattcgatcaaattggcgagtgaagaattaacggatgatgtcatcaagcaattgatcgaggtttcttatcaactggtttatcagaagctgacaaagaaacaaaaggcggaaattgaaggataaaaaatggcgctgcgaattatgcagcgtcatttttggttgttttttctgaccaatgtaaagccaagtagtagccggtaatccccatcccaattaaaaagcaggcagcgtcgaagctattgacatctggcttgaagagcgcataaaggatcacgacgaccagccaatttgcaattccccacaatacatttgtagaagcggaagcaggctttttccatggaacatcccatttttctgcagtgatccccttaacaaaatgaggaacgccattggcaaacaacatgcctagaactatacaaataatcgaatccatcgcaatgatctccttctaacgtgttcatcctgtagtatacctctttcactctaatttttctccctattcttaaaaaaacttataggcggctgagcagagaatttaacagcagagagaaattgatgttatggtggaaatggttagaaagaattaaatttaaaaaatataaggaggaattcactgatgaaagcaccattgattactatgaatgatggacaccaaataccggcagttggcttgggtacgtatcagattcgcggaggggaaggtttggatcaaatcttgacggcgattcaggatggctatcgtctgttagacacctccaccaattatgatagcgaaggaatcgttggtgaggcaattcgccgctcaggaattccacgttctgaattttttgtgacgacaaaattgccaggtaaatatcatcactatgaggatgcattgatgatgattcaggaatcattattccgaatgggcttggattattttgatttgtatctgatccactggccactcccaaaacgtggcttgtacgtggaagcatggaaggctatggtgacggcgcagaaactaggcttgatccgttctatcggagtatcgaactttgaaccagagcatttagataaaattattgatgagacgggtgtgactccagcaatcaaccaaattgagatccatccttattgggttcaggaacgaatggtagaggccgataaagagcgtggaattctaactgaagcttggagtcctctagggcgcggcagcgatgcactgaaggaatcagtgattacagaattggctgaaaaatatgggaaaacttccgcacaagtcattttacgctggcatgcgcaacggggaattattcccattcctaaatcacggaatttacagcaccaacgagagaatctggctatttttgattttgaattgacgcaaacagaaattgaacgcatcaatctattggaaaaagccgacggacgaatcgaaggacaagatccaaatgaatacgaagagtttgactaagcggcatcgctacttttttgtattatctttaataagaagttaatgccaacgctgcctattcttatctggacaaagtttattctacgaacaattaatttttcattcaaaaacgttttcaattgtggcatactgaaaagtaagaggaagctgcaaggaggacacaatgaaaaaagtagtggcattgatgggtgtgttggcggcgatattactatttttttggttcaatcaaaaaggtgaagtgaaggagcaaacgacagcggacttttcgcagccggagcaagtcgaaccgagcgaagatttttttactaatcgtgatttgaatgagctggaaatggtgacctattcacgccatcaagagatgatggatgatttgactggagagggaaagttagtcagaaagtcgacgcataaggaatttgttggagcaaaagcgaacggcgagggcctttcttggacagcctatttcgaaaaataaaaaacgttttgatcaattttttgatcaaaacgtttttttgttctgtaagaattaggtgaagctacaaattcacctgagtaaatcgctgaacagaaattttataggctgcccacatcgcaacgatataaattaggattcctgcggctaagattggaagttgctgcatttgcccattaaaagtgactgagtccaaccatttaaaagcaggaaagtggacgattacttccaagattattgctaataaggtcgctggaaataatccctttagaaaagaagcgcctaccttataaccagttttaaagtaagtcgttagaaaaatcaaattgaagcaggcgaagatcatcaacccaaacccatagaaggcagtatttgcttcaattcccactggattaggttgtgaaaacagctgcaggcgtagaaaggcaaacggaattgaaatcaagattgtcagcaactgcgaaacaaataataccagccattttcccaagacgacttccgcctttttcaacggcagcagggtagaataatagatatcattggtttcacgggtgtacatcaaatttacaaagttcccaatcagactaaagagaaagaccatcgtatagggataaccgggaattaacaccagcggtcccattaaggtgaagacaaataaatttgggtgagccgctaagcgaatctccttatatagtaagttagaaatcataatgttttccctccattcgtaccatgatgtcttctaggctaagagcttccatttcatcaggctgcttcaaatactgaaaataatcgataaattcttttttaggcgcatccttgatcagctcaccttctttgatataaatgattgcatctgcacatttctctaaatccgatgtaatatgcgtagagaaaagaatacttttatcgccatttttaacgatctgttgaaaaatttcgagcagttcatctcgcgaaaccggatcaagaccactagtgggctcatcaaaaataaatagttgtgcttgatgagaaagagccaaggcaatcaaatatttgactttcatcccagcagaaagttctttgacttttttgttcggttccaaagagaagagcttcaaataattttgataagcggtttcatcccaatctgcgtaaaatcgtttcgtaactttagtaatatctttaattttcttctccttataaaaatcgataccgcctaaaacaacaccggttttttgtttgcaggaaagctcattctctaaaaaaagcgtttcaaacatcctgacatgtccatgatctaaaggaatcaagtttaacagtgcttttaagatagtcgttttacctgcgccattgactccgatcagaccgacaattttgccttttggtatttgaaagctgacatttttcaatgaaaacatcggataatttttagtaagttctgttacttcaagtaaatgcatcatgattcctccttttgatcaaaaatattctccatcatgtttccggtcatccgcataaaggcctcactatcaatcaaggcaattcctgtagaggcagggttcgtgtccccaagaacaatcaatgtatctcctgtttcgatattgagaaggtcgcgggcctttttaggcaggacaatctgtccacgagctcctactggaacgattccaaagatgtgtttgccagccgggccaatcgggatgccttcagtttcttcattatgacgaatcaaatcggttaatgtaacatcgtacagactagctaacgcatcgcacttcattacgtcaggtaaagaatccccattctcccatttagcaacggcctgccgagatacctctagacgttcagccacatattccaaagaccaattatttcgatttcttaatgatcgcaagttgtttgcgatcggattattctgattattcatacttttcatcctccttgattacactttatcgtacttaaatagaaaaaagaaccaactgtttataacgaatttggttatgcttggttgcattttggatatcaaagctttgaataggcaaggttcagataggagtgagaaggcgtagttatcataaattcaactcccttgtgaaaaaaatacctagtcttcttgaaagagactatgcaaacttcaaaataagaatactttaaaaaaagagcgctgaaagatgcggcagctgacaaatcagatacgattttaagaagcgagcagtagagtgtttttaattaatagatgtattcgataggttctgcttatatataaatgaacaagctgattaaaagacgaaataatagggaaaacgtaaaatataacagtaagaagaaaaagagtgttaattattaattcattatctttggtaacttattgttttcgtcaaattaaggaaggaaagtctaaatgaaaaagaacattttattaatcagcttaacgatactctctgtgttcagtacctctactgctatcaaagcagaagaagcaacccaagaacaaagccccatcgaatctggagatagttcaacttcagctagtgaaaataacaatactattttttcatcaaattcaagtgaacttaatggtcaaaatatagaaaactctattgaaaaacaaacggtagtggtgaatggtgaagtggtagaattggagcctccggttaaagaaggtcaggccgaagccaatgcgaccgaagcgcccaaagaagatttagtccaaggaaacgcgcggtcatttagggctgctgcctcatccattccaatgtatcgtttatataatcctaatagcggggaacatttttacacgaagacggtgagtgagcgagatcacctgcgatcggttggttggcgttatgaagggattggttggcaagcaccaacgaacggaaatcctgtttatcgcttgtacaatccgaacgcaggagatcaccactatacgttacttgcgagcgagcgcgatcatctgaagaaggtcggttggcgcgatgaagggatctcttggtactcgccaaattcagggatacccctatatcgcttatataatccaaatgccaaagcagggtcccatcactacacaccgattacttctgaacgagataatttaaaaaaggctggctggcgttatgaagggattgcctggtatgcggttggcaatggagaacagagtcatgaggattatcgtttgttaggtgtgcgaaattataatcagtatgcattaggcgcaccaagtggctgtgaaggcgcatcactactacaagcattacaatacaaaggcaaattaagcggctggagtttgcgctcgtttttaaataccattccgaagtcatcaaatggaaatcccaataatggatttgttggttcaccatttgttgaaaatgcgtatacttattctgctatctatccagcaccgcttacaacttggggccaaaaatatgggaatgttcaaaatatatctggtagttcaatgaataccttgataaatgaagtaaaaaatgggaatcctgttgtggcgtgggtgacaattaattttcagccaattcgttggggaaattggagttttggggttgctgcaaataataaccatgcagtcactttagatgggtttaataaggcaggaaatcaagtacatgtgtctgatccgatcagtggctcttattggttgagtcgtacgacttttgaagcgatttataatgcaagaaaatttgcggtagttgtgagatagacttatccctcaagctaaacaaaaaaacggcctacgccgttttttgtttagcttccacccattaggaagtctagaatgttccagccatcagaagtctcactgcggtaaagttcggtatagccgcattgtttacagctgatagtggtaaattttttgttttgaacgtcgaaaattttggcgaagtttccgccagttgcttggaactggtcagaagtataatgttgacacccacatttatcacaaacaaattgtttcctttccatctcttttccactcctttttcattttcaatccgtatacaatctagctatgtgtttcaatcattgatagtcacacgtttgctatctgcaattttataaactgcgacaagctaggcttgtatcctctttgatagttaaaattataacaaatttagcgctttgttcctccgtctttaggagtatctattgaaatcttttttgacaaatcatcgtttgtttggttaaataagaacatacgttcggttgaggagttggttttagatggagctggaaagaaaaatagaaattttagcggaatctgcaaaatatgatgtttcttgttctagcagtggtgtggagaataatacacgtcaaggaacggtaggcagcaccgcagtttcaggaatctgtcattccttcacgccggatggtcgctgtgtctcgctattgaaactattatttactaatgcttgtatttttgattgtcactattgtattaatcgaaaatcaaacgcgattccacgagcgacctttacaccgcaagaggtagcggacttaacaatggatttctacatgcgtaattatatcgaggggctgttcctgagttctgcgattatcaaaaatccggactacacatgcgagcttttgattaagaccttgaaaattttgcgtgaagaaaaaggttttcgcgggtatattcacgtcaaggcgattcccggcgcggatgaaaagttaattgaagagttaggctttttagcggaccgcatgagcgtcaatgtcgaactgccttcccgcgaaagcttgaaattactggctccggataaagatccgtttgacctatataaacccatgaagcagatcacgacggtaaaaaaggaacaggaatttttaccagcggttcggcgcggtcctagttttgtaccagcggggcagtccacccagatgattatcggagccagtccggagagtgatcgttctattgtcaagatttcagagaatttgtatcaaaaataccagttgaagcgtgtttattattcagcctatattccggttaatcaggataatttattgccggcagtcacgaccgaaccgccattattgcgggagcatcgcttgtatcaagcagattggctgttacgcttttataaattcacggctgatgagatattgtctgaggatagacccaatttcaatctttatcttgatcccaaagccaattgggcagttcagaattatcaacgcttccccgttgacgtgcagactgcgtcttatgaccagttgctgcgagttcctggtattggacctaaaagtgcacaaaatatcgtaaaggcacgaaaatactaccgactacatttaacagatttaaagaaactagggatcgtgattaagcgggcgcaatattttattgcctgtaatcatgaaacgccagcaggtttgattaaggaccctgaatggatcatcacgtcattaatttcttcgaagcaatacgaggtgttgaaaaaacacaatacccaatcgaccagcgagcaattgacgctctttgatgtagaacggtttgaacatgcaaaaagtaggtgagagcattgcgagaatcaacagagtattgggaatatgatgggagttttctaggttttatgacggttgttgatcgtagttttcgtgaaaagcaatttccagtcatgattttaaccccagagacagccgtagaaagtctgttttttgcagaatggatcgaaacaaatcccgaacgtggggaaaaaatctatcgtcgtttacgtcaacgactaaggccggaaaattttctttttattcaaaatgggttttatgccactcttgaaggaaaagaacgctatttattggatgccatcgagatcgctttgcagacgaaggatttattagaaaatcatttaggacatccttccatcttagctttacggaaaagcattcgaacgatgttaggagagaaccatctactgacaggattcgttcgttttgaatacgttggtgacgtgctattcagtaaaattaatccgaaacactatgtgatgccttatctttgcccgcattttgcggagcgttatccgcaggaaaaactcatgatctatgacgagactcatgagttgttaggcatcattgatcgcggcgatatccatttgatggaacataccagctgtcctgaatttgctgaagcgagtaatgaacaggcaattcgtcagcagtggaaaacctttttgcgttcagtcacgattaatgaacgggccaactatgtggcacagcgaaatcatttgcctttgcgttttcgtagcaacatgacagagtttaagtcctaggaagaagaatgcctttttgttctagattaagtaaacattctgctaaataggagtcgttatgttcaggatagatagggtgcgtaagtggtactggagcaacagtatctgtccgaggtagatttttcccacggtataatgggtcataccacaaaggatcaggcgtatagctgcgtttttccatttcagctagaaccaaaagatgaaattgaaacaatttgtagtaagagtgagtaaagacataatctactgtagcgtgtttcttaccccagccttttcctcgcaaggcagccacttctcgatgttggccaagtagctgctgtctaggaagcagcggaattaacgtttcatgccaaagacgcattttttctcctccgttcttagttaactgaattttttcatatattgttgggatttacgaatgatttgctctaggtgctttgcttttatgatttttccattctgctttataataggaggcattaggaagcgagtgaatcacatggaagagaaaaaagtgcatggatcgatggcggtcttagcagcattactggcgaatgtgctagtagctgtcagtaagtttgtcggctacatgcttagcggcagtgccgcaatgatgaatgaaagtattcatagtgtggtggattgcagtaaccaaatcttactgttattcggcgatcggcgagccgctcgtggtcagagtgagcttcatcaatttggcgaaggacgagcgaagtatttttttagtacgattgtagcgacgatgctgtttttcggaggtggcgccctgggtatttgggaggcggtggaaaaattatcccatcccagtcatgaagttgcgaatccattgatcgtattaggcatcttggttttcggtattttagttgagggcagttcattaaaaatagcgatcaaagaaattcatgaattaaatacagagaagctgccgctgttcaaatttttacacgaaagtcgccatagtgagatattgattatttttacagaagatttttgtgcagtgatcggcttagttttggcgatcattggcacgttattgacaatgcttacaggaaatccaatgtttgacgctttaagcgggttgttgatcgggatgatgctgatgtttgcctcgatctttttagctcgggaattttatagcttaatcattggagaaagcgtgtctaaaaatgatttagtaaaaattcaaaatgctttcaaacgtgatgaagtcaaaaagttgatcgatatcaaaacggtccatttaggtcccacagaagtgatgattgctgcgaagattgacatcgcagattcttatgaagggatcagctatgatgtggtaaaccagatcgagcgagtaattcgcaaggctttgccagataaaaaagcatatatctatatcgagaccgatgagtttgatccagactatgatcggaaacgccaaacccaatcggacacataacccctgtgtccgatttttgccagttatgcttttcgcaggttattatgtttggcttacaatttcacagtcacaacaaaattgtaggcaagcagtttagcataatggtatgcgaaacgaaaatcggcctcatttttcacgttttttgaaaaatgaataccttagaacgaggtagctgccagttatgcttttcgcaggttattatgtttggcttacaatttcacagtcacaacaaaattgtaggcaagcagtttagcataatggtatgcgaaacgaaaatcggcctcatttttcatgttttttgaaaaatgaaaaccttagaacgaggtagctgttagttatgtatttcgctgtctgtgatgtttgaaatccattttttcgtaagaccatcaacataatgagccatttataaacaattgacacaaattgttggataaaaggagggagattaaatgtcttcgttgcgcttcttttttacttattcacgagagtttcttcgtcattggggaagctatattcttctgatcgttggaacaaatattgcgttagaaatgctagtcattccattagttcaatttttgattgttttcattttgaagcaaggaaatattccttatgtttcaaatacgaatctattaacgatattaacaagacatcccgcagtgttgggagcattgttgctgcttttagcatttgttctaacgttggtttttctccagttcacttttcagctatttggtatcaagagtattcaaacaaaagagaatcagtctctttgggatttgtttaaaaagtcgctttatcacatgcgacacttgcggccagagacattctttttctttcttttctattttttactgattctgcccttcgcaaatgcaatttttcgaacaccattactaagcaaagtgacgattccggtttttattttagaagccttgagtgaaaattttttgtttctcttattgctgatagttgcttcgatggttgtctcttatattggaattcgtttgctgtttgtattgccgctaatgattttttcggatgcagcaccgaaagctgccattgaaaaaagtttaaagctgacttatcatcggtactggcattatgcatggcgaatcttctttttaacaggtattttgaccttggtttcttatgttggatatgggataagctatgggcttcaggtaggctttgatttacttccgaagccctttccagcaattggtgctatgcttaccttatcgagtatccaattgtttagtcaattaatgctggcaggggcaacggttttgtattttagtgtgttggttcaaaaattctatccattagtaattagtggcgaacgtcctttgcaattagttcggccaagtttgtggacacggatcgccgcagtgatactattcatttttttaggcggaacgaccttactcagcaatgttctttatctaaccggacttgaggattcgattcccttaaccatctcacatcgaggagtcgataatggaaacggcgtacaaaatacaattccagcaatggcggctactatcaaagaaaaacctgattatattgagatggatatccaagaaacgaaggatcgtcagtttgtcgtgttccacgataaaaatttaaaaagattgacaggacaagacaagactactcatgaactgacgttaagtgaaattcaagagctgcaagcagttgagaatgggcacgtggcacctatcgcgagttttgatgactacttagcttttgctaatgagcaccatcaaaaattactgattgagatcaaaacaactgctgatgattctaaagagatgatggatagattcatcgataagtatcaagcaacgattctttctaatcaccatcggattcattccttggattatcatgtggtagctgagttaaaggagaaggcaccaaagttgtatgtcagttatatcttgccttataatttagtattcccgcaaacgcctgcgaatgcatatactatggaagaaacaacattaaccagcgattttgttcgtcgtgcccatgaagaaaataaagatgtctatgcttggaccgttaatgatgccgattcgatggatcgaatggtctccttgaatgttaacggaatcgtaacggacgaccttcaaacattgcaagaacagattaaaacatatgaagaaaatccatcttatgccaagcgaattgagatgtatatcaatcgtttgccagcgttggatgagcggatcagcgagaattagagtaaagagaaaaaaattcattaaatttccatagagttttcgtaaaagattttcgaacagccgcctgctctatggtagaatagctatatatttcacaaaggagttcaacatgaaaaaacgaggttttgaagttacgacagcttatcaagataaaaacatcaatttgccgaaacgagcaacgaaaaatgcggcaggatatgattttgaagctgcagaggatatcgtgatcccagcagtttggaaacagatcatcaaccgctttactaaaaaatctgaggtatctgaaaagattgtcaaaccagttttagtacctacagggatcaaggcgtacatggagcatgatgaatatttacaattagcgaatcgttcaagcaatccactgaaacgtttcttgacgttaagtaacggggtaggtgtgatcgatagtgattattataataacccagacaatgaagggcatattatgttccaattttcaaattttggtttaaccgatgttcatataaaaaaaggcgaacggatcgggcaaggaattttcttgccatttcttaaagccgataatgataaagaaggtgctgaaagaactggtggatttggttcttcagacaaacaataaattttaaacaacgagtgaggcgaagggtttggcgaaaaaatccaagacacaatttatctgccaagaatgcggctatgtttcgccgaagtatctaggtcgttgtcctaactgcggaaactggaacacgatggtagaagaaattgagcaaaatcaccctgaagatcgccgcaatcgggtgagtctgacaggggaacgcgcacaaccgacgaagctaaaagatgttgtctttaaaaaggaaacgcgcattcaaacggaattagcagaattgaatcgggttttaggcggcggtgtagttccaggttcattggttttgattggtggagaccccggcatcgggaaatctacattacttttacaggtttcgcaccaattagcagcaactggcggaaatgtattatatgtttctggagaagaaagtgctcagcagataaaattgcgagcagagcggcttggttcgagtgagacagacttttatctgtatgctgaaacagatatgggcgagatcagtcggacgattgaaaatctgaaaccagattatgtcatcattgattcgatccagactatgacgcagcctgacattaccagtgtagctgggtcagtcagtcaggttcgtgaaacgacggcagaattattgaagctggcgaaaaccaacggtatcgcgatcttcatcgtcgggcatgtgacaaaagaaggaaacatcgcagggcctcgaatgttggagcatatggtggatactgtgctgtactttgaaggcgaaaaacatcacagttttcggattttaagggccgtaaaaaatcgttttggttctactaatgagattggaatttttgagatgcgagaaagtggcttagtggaagtggctaatccttctcaggtctttttagaagaacgtttagaaggtgcgaccggttcagcgattgtggtggcaatggagggtagccgaccgattttagttgaggtccaggcgttagtaacaccaacagtcttcggaaatgcgaaacgtacgacaactggattagactttaatcgcgtatccttgatcatggcggtcttagaaaaacgcgccggcttgcttttgcagaatcaggacgcctacttaaaggctgcgggcggtgtgaaattaaatgagcccgcaatagatttggcggtagccgtggcgatcgcttctagctacaaagaaaatggcacggaagcgactgaatgttttatcggtgagattggtttgactggtgagattcgtagggtcagcagtatcgagcagcgcgtcaaagaagccagtaagttaggtttcaaaagaatctatctccctaagaacaacatgggagattggacgccgccaaaggggatcgaattgattccggtggcaacactaggtgaaacattaagaaaagtattccgttaatgagaggttgtgccagaaatactttggcacaactgttattctaaaatttttgcataaaaaaatagattaatagaacttaggagggatggcatgcagaaacgtgtgttaacagtaattatcctgattgttgggattagtttaggagtcactttcctaccaacagcctggacagcaattggcaatgcagacaacatgtggttgaataattcacttacgaatggcctgattggtgcaattattttttatattatttctttggctatcgtagaaccaatcacaattggggtaaaaagaattgagaaacaattaaatgagcttagcttgacttatattttgtttggagtgatcggtgcgatcttaggattgaccttgggattgatcggaacgaccccgttgtaccagattccgattcccttcattaatagtgcattgccgattttgattatgctgctattgggttatttaggcttccgaatgggaacgactagaattgatgaattgaaaaaattctttagcggccgcaataaaaaggctgagacaaatgaaggtgaagtccttgagcgcaaagcggatgatcattttcataagtataaaatcttagatactagcgttattattgatggacgtatttatgatattgcgaaaacaggctttttggaaggcgtcctaatgattccgaactttgtcttgtatgaattgcaatatattgctgattctggcgatagtttgaaacgtgtccgaggacgtcgcggcttggatatcctgaatgctttgcaaaaagaagaaggtatcgccgttgaaatgtacgatggcgattttgaagatatcagcgaagtggatagtaaattgattaagctggctaaattattagatggtgtgattgtgacaaatgactataacttgaataaggtttcagagttccaaaatgtcgctgttttgaacatcaatgctttagcgaatgcggtgaaaccagttgtaatcccaggcgaaaacatgaacgtcctagttgtaaaagccggaacagagcgacaacaaggagtcgcttatttggatgatggcacaatggtagtggtggaagatggacaacattatatgaatgaacacatcgaagttgtcgtaacaagtgccctacaaacggctgctggacgaatgatttttgctaaaccggctcattctagccgcaacattaaagatgattcacctgaaaagaagttagactacacaaatgagaaagcagcaaaatagcagtgtagctttactaaacaatggattgattgtacaatttgtgttgagtagcaaattgtacaatcaatccatttgctaaataagcgggaaagaggaactattatatgtcgaaaattcgtgtgcgctacgcaccaagtccaacaggacacttacacatcggaaatgcccgaacagccttgttcaattatctatttgctcgccacaatgatggagaattcatcattcggatcgaggacactgacttaaaaagaaatatcgaaggcggcgaaaaaagccaattagaaaacttggcttggttagggattgattgggatgaatcccctgaaaatcctgggaaatatggtccttaccgtcaatcagaacgacgcgacgtttatcagccgttaattgatcaattattgatgagcaatttggcatacaaatgctactgtacttctgaagagctagaggctgagcgtgaagcgcaacgtgcacgcggcgaaatgcctcattattcaggcaagtgtgccaatctaacacctgaggaacaagcagaaaaagaagcacaaggtctagaaccagtaattcgcttccgtgtccctcgcaataccagctttacgtttgaggatatggttaaaggtgagatcagctttgaatcggataatgtcggcggcgactttatcatccaaaagcgtgatggtatgccaacatataactttgcagtagcggtagatgatcatttaatgaaaatcacgcatgtactgcgtggtgatgatcatattgccaatacaccaaaacaattaatgatctacgatgcctttggttggccgcgtccaacatttggtcatatgaccttgattatcaatactgaaaccggcaaaaaactaagcaaacgtgatgaaagcattctgcaatttatcgaacaatatcgcgaattaggctatttgccagaagcaatgttcaacttcattgctttacttggctggtcgccagttggtgaagatgagatcttcccgcaagatgaattgatcaagatttttgatactgatcgtttaagtaaatcaccagcagcatttgatcagaaaaaattagaatgggtcaataaccattacatcaaagcgatggatttggataaattaactgaattatgcttgccatatttaatcaaggctggtaaagtcgaagaaaatccaacgcctgaacgtaaggattgggtgaaacgtgtagtcagcttatatcaaccgcaaatgagctacgctgcggaaatcactgaagtatcaagcttgttcttccaagatcatcttgagttagacgatgctgctaaagaagtattagccggcgaaggcgtcccaactgtcttagctgccttcaaagctcagctagaaagcttagaaacagttgacgctgctaacgttttggcttcaattaaggctgttcaaaaagaaacaggaataaaaggaaaaaacctttggatgccgattcgtgtagctgtcagtggtgtgacacacggaccagaattgccagaaacagttgaaatcttaggcagagaaaaagccctagcacatttagatcaagtaatgtaaacacaaagaagagaagaagtagtaggtgacgatttttcagagagactgcgggtggtggaagcagtcaaatcagcacttatgaaatgcacctccgagtggtcttagcgatatgtagctaaggacgtttcacagacgttacctgtttgaggcagatactgcaaacaaaagtgggaccacgttaaagcgtcttttgaggaaactcaaaagacgtttttttgcgagttacgctttttgcagttttgtgttgtgcaagggtcaaataaggatttttaactaaactaacagatgcgtagtttagcggaatcgtatgcgaaacgactataagatcatttttctggtttttagaaaaatgagttctttaattggagatagcctaatagcagggaattggaaatgtgttgaatgttttatggataaaagtctaaaaataaaaaaggagttgaggtaaatgggatggtggcaagaagcgattgcagcagcgaagaaaaatgatccggcagttaggactggcttagaggttgtgcttacatatccaggtgttcacgcgttgttttttcataagttttcacattttctctatcggcatcagtggtttttgttggctcgaatccattcgcaattttggcgttttttaacggggattgagattcatcccggtgctaagatcgctcctggtgtttttattgatcacggaatgggtgtggtgattggtgaaacggcagaggttgagcgagatgttgtgttgtttcatggcgtaacattaggcggaacaggaaaagatactggcaagcggcatcccactgtacgtcaaggtgcttttatttcggcgaatgctcagatcttaggaccaatcgaaatcggggcaggaagtaaaatcggtgcgggggctgttgtcttagaagatataccagcggatgcgactgcagtaggtgtaccagcaaaagtagcaagattacatggaaagaaggtacaacatgattaaaatacacaatacgttgacacgtgaaaaggaaatttttaaaccaatcgaggaaaataaagtccgaatgtatgtctgcggaccaactgtttataactatattcatatcgggaatgcccgtagtacgattgcatttgatgtcattcgtcgttactttgaatatcgcggctatgaggtgaattttgtatcgaactttaccgacgttgatgacaaaattatcaaagctgcgaaggaattatccattactgcaccagaagtagccgatcgttttattgcagcctttgaagaggatactgcagcgctgaatgtaaagccagcgacattgcatccgcgtgtaatcaatcatattcctgatattttagcatttatcgagaccctgattgaaaagggctatgcttacgaagcacacggggacgtctattaccgtactcggaaattcgaacattatggcgaattgagtgatcaatcgattgatgaattagaggttggcgcgagccaacggactggtgcggagcaagcaattaaagaggatccattggattttgccttatggaaaagtgcgaagccggatgaaatttcttgggagtctccttggggtgaaggacgaccaggctggcacatcgaatgttcagtgatggcgacaaaacacttgggagacacgattgatattcatggcggtggacaagacttggaatttcctcatcatgagaacgaaattgcccaaagtgaagccaaaacagggcaacgttttgcgaactattggatgcacaatggctatgtaaccattggagaagacgatgcgaaaatgagcaagtcgctaggaaactttgtaactgttcacgacttagtcaaagaaatcgatcctcaggttttacgcttctttatggcaacgacacaatatcgtcgcccgattcgctatagtgaagcaaccatgaaggatgctcaggccaatctgcaaaaattacgtactgcctttgaaaatgcggccttccgtcaagatacagcggaagcagcgttggctgatgaccaagaaaaaacgagtgagctacaagtgctgaaggatcggtttgttgaagagatggacgatgacttcaatgcggccaatgggatcacggttgtatatgaattagcaaaatggctgaacaattacagcgaccaagaaaaagtttcagcggcgattttaactgcggcattagaagaatttacaaacatgctgaatgtttttgggatcgaattccaaacagctggcttattagatgaagagattgatcaattgattgaagaacgtaatcaagcccgtaaagataaaaactttgctcgcagtgatgaaatccgcgatcaattaaaagaacaaggaattattttagaagacacccctcaaggcgtccgttggagacgagcataatgacagactataaacaattaaacgcactggcactagcgtatgttggtgacgccatttatgaaacttacgtgcgggattttctagtccgagaaggccagacacgcccaaataagctgcatcatatggcgactcattttgtttccgctaaagctcaagcaacgttgattcaaaaaatgctcgatgatggtatgctgacagaagaagagcaaggcatttatcggcgtggtcgaaatgcgaaaagttatacttctgcaaaaaataccgacatcatgacctatcgtatgtctacgggttttgaagcattaatgggttatttacacttattggaacgaaaagagcgactagaagaattgatcgcatggtgtttagagaaagcgggcgaaacaaatgaaggataagaagcagcgtcgaggaaatgatcgacggaatcagcggaaaaatgatcggtctaaagatcgccgcaaagagacggaaacagttgaaacagaagagaataattttgtttttggttatcatgccagtgtggaggcacttcaagctggtcgaggcaataaattatttatgcaagaggatgcccatggcgataagatcgaccagctgaaaagtttagcgaaggaacaagcggttccggtgaagtgggtacctaaacaaaaactggatacattaagcgacggcggtgttcatcagggaatcgttttaggaattactccttatgaatatttgactttggaggacttgttagcaaaaaatacttcagaagcggcgcccttcctgttgattttggatagtttagaagacccacataattttggctcgattttgcggacggccgatgccagtggcgtgtcaggcgtaattattccaaaacatcgctcagtaggtattacgccagttgtgacgaaggcttcgaccggtgcagtagaatacgtgccgattgctcgagtaacgaatttggcccaaagtattaagcagttaaaagatgcaggatattggattttcggaacagacatggaaggaacggactatcgtcaatggaaggtggaaggaccgatcgctttaatcatcggtaatgagggcaaagggatgagtgctggactgaaaaaggaagttgatgagatgttaacgatccctatgacaggacatgtgcagagcttaaacgcaggagttgctgcgggtctattgatgtatgaagttttccgaaagcgaagtgaattgtaatgaaaaggcaattgttgatcgttgacgggtacaatatgattggtgcatggcctgagttgaccgcattaaaaaaccaagagcgtttagaagaagcacgcgaagcattgctatttcgtttgtctaactatgctaagtaccaaggattggaaacaattgttgttttcgatgcgcaatttgttccaggaattacccaaagctaccagaagtatcagctgactgttgttttcacaaaagaggatgagaccgccgatagttatattgaacgaattgctggggaattgaatgatcgcttgactcaagtaacggtagcaacgagtgatcttgctgaacaatggaccattttctcgcagggggcattgcgaacttctgcgcgtgagttgtacaagtctgtccagcaaaccgaggctgtgattaccggggatacaaaagatacgcattttaaaaattttcgacgtaattccccgtggaataatgaacaattgcaaaaattgtcacaaaaactggacgaattaagcaaaaaaaaataaattgattgtcgacacccctctctggcttataaagcgtgtatgcttttatttgttgagaggggtgtaaaaatgaaagaatcaacgcgttatgaaaaaattgatggtgccgcttttgaagaaatgtttagtcaatatttaccgattgtctatagtatgcaatcccgttattcgattcgtgattttgattttgatgactggctgcaggagggacgaatcgcactgaatgatgccctgcagagctactgtaagggtcgtggaacaacgtttggcttatactacaagatgatatttgaaaatcgaattcgttctctcttgcgtcgtcagcaagctcaaaaacgatttgcccaacaacaggctgtatcaatggataaagctgatatggaggcttttgatgaacactttcaataccatgagtacatggaagaaaatctgtttattagtgagatgttactagctggagaagttccactgtcttcattagaaaatcggtccttgtattactatctcaagggtgaggagccctcgacgatcgctcagcttctaaatgaatcagaaaaggcgatccgtaacgcgttgaatcgggcaaagaacaaattaaagaaaaaactatatgatttagatgaataagggctgcattcagcttaataaggtataaagttgcatatttttttatcttatgataacattgaaaagttttagatttgtgctataatgtattttgaggtgaactgtatgccaacaactttagcgtctatcaagaaaaacttggaagaccgtattggtgctccgattatgcttgttgctcagacgggacgcaagcgtcaaacgcaacgcaagggaatcttaactgagacatatccttccgtatttgtggttgatttggacccagaagaaaattctttcgaacgtgtttcatacagctattccgatgtattgactcgcacagtagagatcgaatttttaacagaagcaatttaaaaaccatggagcgtatgctccatggtttttatttgtcttcgacgttcttttgtgtttctttagctgctttattttgttcaactaaaagatcacgaatatctgctaaatattcttcagctgtcggtactggtacctcttcttctttttcttctttagaaatactactttttgctttgtttgcagctttaacaatcaggaataaaacaaaaccagtaataataaaggtgatcaatgcactaattacatcaccaaacgcaaaggtcacgcctttaactggtttccaatccaaaacggacatcgcctcgttcaaatcttttcctttcgtaaacaatgacacgatcagcccaaccaacggtgtaattaatccattaacaatatttgtcacaattgcagtaaatgcagtaccgattacaacaccaacagcaagatcaatgacattgcctctcatcaagaaatctttaaattctttaatcatagggtcttcctccttatttgcaaattgtataccatccaacgttttactatcttcttatcagataagcttttccaaatatactttcctttttacgatagacatcacttcgtataatcaaaaaacagaaatggagccagcgaagttggatgagaatttttccttaatttttagtatagcgaaagaagaaaaaaatttgaaataaaacagactatcggtcagcgcagatttcgaatcttggagctcgcctgtgctataattagctttagtgataaagacaaaggaagacccttttttcgtttttttagaagtattggggagggttccttttagcggagaatatctagcttgaaaatcaagcctatttttctttgaaaaaaataattgattagcataaaaaaggagctttgtaatgatcgaacttaagaagggcgtgcggctgcacgttattgcgacaaagaaatacaaaacaattcaaatctacgggcgctttaccacccgtttaaccaaagaaatcatgactaaacgagcccttttggcgaacttattggagaccaattctttgcgctatccagatcaaaccaaattgagcggacaattagccgagctttacggtgccagtttcgggttgaatgttggacgcaaagggaatctgcattggttagacattggtttaggcattgtcaatggaaaatacgttgatgatccaaagctgttaccaaccgcaatggattttttgaaggagattctattttaccctaatatccaggatggaaaattcgatgaacaaacgtttcagctggaaaaagaaaatttgcaaagctatatcgagacattgcaggaagacaagcagacaatggcttccttaaagatcaaagagacctattttacggatgaggcgcaaaaattaccaagctttggtacagtagatgatttagagcgtgagacaaacgaaggtcttgcggcatattatcaggagatgattacacaagatcaagtagatttatttgtgattggtgatgtagaggaagcggaaatggccgagctgttcaaagagctgccttttgccgagcgaaaagaaagcttcccggctatttattattatcaagccagtgataatgtgattcgcgaacagcaagttcaagaaacggtgacacaaggaaaactgaatctagcttattcaaccgatgtttattacgaagatactgaccgttttgcactgctggtctttaatggcttgttcggcgggtttcctcattcaaaattgtttatgaatgtcagagaaaaggcaagcttagcttattatgcctcaagctcttttgatacattccgcggttatttgcaggtgcaaaccggaattaatagcgacaaccgtcagaaagttttacgtttgattgaggaacagctactcgaattacaagctggtaatttcactgatttggctttccagcaaacgaaagcgatgttaaaaaatcattacttactaggcttagacagtatgcaaaatgcgatcgagacgacttacttggcgcagtggctgccgcaaagtaaactaacagacgaagaatggctgagacgtttagatgctgtgacaccaaaagatgtacagaaagtcgcgaaaaaaattcgtctgcaggcgatcttctttttagatggaggacaacagaatggataaagtagcctatcaaaaaatcaatgaaatcttatacaaggaaattttgccaaatggcttaacggtctatttgttgccaaaggctggatatcacaagacgtatggcctatttagcaccaattacggttcgatcgacaatgagtttatcccacgtggcggaacagagtacatcaaagttcctgatgggatcgctcactttttagaacacaagatgtttgaaaaggaagatggcgatgtgtttcaaaagtttggtgagcaaggggcatcggcaaacgcctttaccagctttactcgcacaagctatctattttcgacgactgatcaattggaattgaatttaggaactttgctagattttgtgcaagctccgtattttacggaagagtctgtgcaaaaagagcaaggaatcattgggcaagaaattcaaatgtatcaagatgatccggggtggcagcagtttttcgctattttaaaaaatatgtatccgaagcatcctctgcatattgatattgcaggaacgattgattcgattgcagaaattacagctgaggatctatacacgtgctacaatacgttttatcatcccagcaatatgacgctatttgtcgtgggaaatctggagccggaagccttaatgaccttcattcgggaaaaccaagcgaagaaaacttttgaagcgccagaaccaatccaacgccggtttccacaggaatcacctgatgaaatcattaaacgcagtgaagaaaagatgccaattacaataccgaaagcaattgtcgggatcaaaggtttggcagaattaccaaaagacaataaggaacgtctgatcttcaaaatttcgatggaccttttattccaaatgctattagggacgacttcacaaaactatttacgcttatataatgaggggttactagacgacagctttggctacgaattttcattagaccgcagcttccattttgcggattttggcggcgatagtgaaaatccgcaaatgctagcagatcgcttgacggagattttactgcattttgacagcgatccagaagttaatgagaaaaatctgacgcttttgaagaaaaaaatgttaggaaaatatttccaatctttgaactcattagagtatgttgccaatcaatttacccagtcattgtatggtgaatggacgctgtttgatatgcccgaaatcattcaagaaatagaattgacagatgttttggctgcgggtgaattattcatcaaagaagaagccttcacgcgattttatatggagaagaatattcctagttaaaaaagtattagtataaagcctgcaaataaaaagtcaagcaaaaaattggaaagagagctatctggattgaaggcatgacaaatagaaccaccgataatcgctggtttcaacttatgctctcaaaaacaaaaatcattcctcttctgaaagtgaagccagatactcttttactcgaccgtaatatatacgcaaaaacttattcgcaccagcagtcatgtaaacatagtacggttttccttctgctcgtttcttagaaagaaatgcgtaaactggatcattttcgggtgatgttttcactaaaacgtccattacttgaaacagtgatttacgcagttgagcagatccacgtttagaagttcgtacacttttctgattataggtgctggattgattgacacctggatcaacccctgcaaaagcagtcaaggcgcctcgacgtgaaaagcggcgaacatcgccaatctctgccatgatctgtggacctaaagaaggacctacacctttcatagccataactacaggatattctggtaattgtgcagctgtttgatccatctgtaggcgtaactgctcaatagtcctagaaagagtgtttaactgttcaattgcttgcataattaagtttttggtcattttgtctttaggtaaaagagcaatcaactctttagaggcttcgaaaatttgcgctggtttatctggatggaagtcgtaacctttacgcacacagaacttccgataacgttcagtgaacacactcaaagagaccttgcgaacacaatcgacgtgccaaaaagaggcgacaaaatcaacccatttctggctgccatcttttcgaacaggactggtgaaaaaagtattcgctccaggaaaggtttgatccaaaagagcaatgagattatttttaagagcggtcttatgtttcatgtaaaaatcaaactgtcggttcatggtttttagttgatctcttgtcttgtccataaagcaatactgtcgtaggtcattccagttgtcaagagcgtaacgagcaattttgagtgcatcttttttgtcagatttcactttacgaagagaattgtttccaaaatctttaatgagttttggattgaccacactgacataaaaatccgcatccgagagccaacgagcaatgggttcgtgatagcgtccagtgtattccaagacgattctaacttctccttctaggtttgaaagagaatgaatgaagtcgtcgatggcactagaagtatgacagagttcaaagggactagagatcacttcaccgaaaggtcggagaatcgaaacaacacttttacctttagcaacatcaatacctactgcgttcaagacaatcagctccttcagttttgtcgcaatggaaagccagcgtaaacacattgccgattcaatctactggggtgtgacacgaacgtactggtaaacagcagttcaacctgcataaaacgaacgctgtgaatgagcagctggttggcagacttaatcacggacgcaaagtccaaggaggaatatgcccgaccattgccctctcattttaacagcttaagcaacatgatagataaaagggattactaatgggattagtagtaccttataacctataaatatattgtagtaggagggatagaatgccttatgcgttagtaatgggggcgagcggggatatcggtcaagctgtttgcgaaaaactagcggggcaaggctggtccctctattgccactataatcaacaaaaagaaaaagttttaaatttcgtttcagacttacagaaacgttatcctcagcaagatttttttatggtatccttagacatgttgaaggaaacagaagttccgagctttcttgaacacttatttcaagtggatgggattgtttttgcctcaggctttactttttacgagttgctgccagagacaaaagcagatcaaatggatgcgttatggcaagttcatttgaaaacaccgctacttttgttacagagtttgcaggagaaattggcaaaaaatggaaacggccgtgtcgtatttatcggatcagtttatggacatcgtggaagcagcatggagactgtctatagtgctgtaaagggcgcgcaagaagcgtttgtaaaagcttacgccaaagaggtcgcaactttaggaatcactgttaatgtcgtggcacctggtgctgtccaaacgaaaatgaatgataattgggagccgcaagagctgacagagttgatttcggaaattcctttaggacgattggctgaccccaaagaaatcgccgcagcctgcaattacttattttcaaaagaagctagctataccacaggcatcgtattgcctgttacgggtggctggttggaataggaacgaagatatcaattctttgcctaactttaaataggaaaaaaagtatgatagacgtgatgaaaaactaagattattttcttaataagataatctcactaatatgaattaggagtagagaaccaagtggctagtattaatattggagaaacactacgtaaagcccggatcgataaaaaaatcagtttagatgagctgcagcaacgcacaaaaatccaaaaacgttatttgctggcaatagaagaaaatgacttccatgaattgcctagtgattattatttgcggacatttattcgtcaatatgcagatgaggtcaaacttgacggtaattatttgattgatgttctggatggtaaggatcgtccgatgccgacttatcctgaattagaaaccgttgatggactgcgaaaaaataagcatgttgaaagtccgacgcgggctcgttttaaagcgaccttgccgatgattctgttgggattggtggcactagcgattatttcggtggtcggttatatgacttggctggatcatcaagaaaccgcaattattccagaaaatagttccgttcaagttgaacgctcagatgtctcatcatccgtggcagaaaaagtttcatcttcacaaccgaaaccagtggaatcctcaaaagagccagaaaaaccaaaaatggccttcacgatggaaaataatacgacgaacgcggcgacgatgaaagtggagcatgcggaaaaaccgttaaaaattagtttcactggaacagaacgcgtatgggtcggtgtccaagtcaatggcgcgttgacgtatcagaagaccttggagaaaggtgaatctgaaacaactgagcttcctgctgatacggctcaagcagtgatcactgttggcatggcaaaatacgcagaagtaaaaatcaacgatcaagcccttgatttccaacctgggaactcgttgttgcaaaagaatattacgttgaatattgcctacgcatcttagggctgtgtttaaattgaattaggaggaattcataatgaatttaccaaataaactgactgtcattcggattttcatgattccaatctttatgatcgtcgtcttagctccgtgggattggggcacattgcaggttggtaatactgatttagcagtgactcaactggtgggtgcgattattttcgcgatagccagctataccgaccatcttgatgggaaaattgctcgtcgcgatggcttggtcaccaacttcggaaaattcgcagatcctttggcagataagatgctggtgatgacggcgtttattattttagtcgaacaaggaaaagccccttcttgggtaattgctattattgtttgtcgcgagttggcggtaacggggttacgtttattgattgttgaacaaggcggcggtgttatggcagctgcaatgccagggaaaattaagactgcgacacaaatggtcggaatcgtattgctttatttaaacaatgtgccatttaactttattggcatcccaatggatcaaattatgttgtatatctgcttattctttaccgtttattcaggttatgactactttgctaaaaacacagcgatatttaaaggttcaatgtaaaaaatcaaaattacggtcagtaggataggaaaatctatcttactggtcgttttttctgttttttctgttgtactttctgttatagtggagaaaaattgcgtatcttagaaagaagaggaataaatgaaagcagaaattattgccgtgggcacagagctcttattaggacaagtcgtgaataccaatgcaacattcttgtcagaaaagttagcggatatgggaattgaggtttattatcacaccgttgtaggagataatccgcagcgtttggaagagttactgcaattagcagatacacgtagtgaattgattatcttgtgcggcggcttaggaccaacggatgacgatttaacgaaaaatgttttggccgagcacgtcggagtgccattagtacaaaatcaagcaggattagaagcccttaacagcttctttatccaacgacaaagtacgatgacgccgaataatttacgtcagatcgaaacattgcaagatgggattccgttaccgaaccgtactggcttagccattggttgtttatataaaggcaagaaaaacaattatatcttattgccaggaccaccaagcgaattaaagccaatgttcttggaacaagcccgaccattgttagaaaaagaatttccaacaacggaaaagcttacttctcgggtactgcgtttcttcggaatcggagaatcgaaattagtgaccgacttagcggagatgattacacaccagtctaatcccacaatcgcaccttacgcaaagccaaatgaggtgactttgcggatcacagcgaaaacagaggatgagatctcagcaaatgctttattaaatcaaacagaagcggagatcatggcaaaagtcggcgagttcttttatggttatggagaagagaacagcttagtcgaagttgtggtgaacttgctgaaagaaaaacagctgagtatcacagcagcagaaagcttaactgctggtgaatttcaagcgacgttaggtacgattcctggcgtctctgaggtctttccagggggatttgtcacatattccgagacaactaaagcaagctttctaggtatcaatccgatgctgctagaaagtgtcggcgtggtgagtgaagaatgtgcgaaggaaatggcagaagcagctttgcgtttagcagaaacagattttgctctgtcctttaccggagtggcgggtcctgacgagctggaaggaaaacctaagggaacggtttatattgcgttggctcaaaaagatggtgagacgttgattagtgaaaatcattttactcgggatcgttcgtatgtccgccatagctccgtcatgaagggcttagacatggtacggcgagcaattctaaacaaaagctaaaaaagcgaatgtttgttcgttttttgcttgcttttttgatttcaaaccgataaactagggatattgaaaaagcaataatgatgtgtaaagcatattgattataagaaatagggaggatcagctattggcaaatgatcgcaaggcagccttagatgctgcaatgaagaagattgaaaagaattatggtaaaggttcgatcatgaaattaggagaaaaggtcgatcagcaaatctcaacaattccaagcggttctttggcattggacgttgcgttaggtgttggtggataccctcgtggacgaatcatcgaagtatatggtccagaaagttctggtaaaacaacggttgcactgcatgcgattgcagaagttcaaaaacatggcgggacggcagcttttattgatgccgagcacgcattggaccctcaatacgcacaacgtctaggtgtaaacattgatgaattgctgctatcacaaccagatactggggaacaaggcttagaaattgcagatgctttagtttcaagtggcgcagtcgatattatcgttattgactcggtggccgcgctagtcccccgtgctgaaatcgatggcgagatgggtgatgcgcacgttggtctgcaggctcgtttgatgtcacaagcattgcgcaagctgtcaggctctatcaacaaaacaaagactattgccgtcttcattaaccaaattcgtgaaaaagtcggtgttatgtttggtaatcctgaaacaacgcctggtggacgtgcattgaagttctacgcaaccgttcgcttagaagtacgtcgtgcggagcaattgaaaaatggaacggatatcgttggtaatcgtaccaagatcaaagtcgttaagaataaagtagcgccaccattcaaggtagctgaagttgatattatgtatggcttcggaatctcgcaagaaggcgaattgttagatatggctgtggaacaagacatcgtcgacaagagcggtgcttggtatggctataaagaagatcggattggacaaggacgcgaaaacgctaagaagtatttggcggatcatccagaaatgatggcagaagttgcgacacgtgtacgtgcagcttatggtatcggtgaagaaggcgatgtgacggaagctgaagaagcgggtcaggaagaattgcctttagatgaataaaaaacaaatcaacactaatgatgaggcatatttgtccggtcattagtgtttttttgcggactattttacagcggatcaaagcgctttattgttgaatctggcaaaagagaaataaagttgacacgctatcagacaaacattagaataaagttgtgtgactctcacacatatgcaagtaggcatattgataatttgacattcgtttatcaaaaaactacagataggtaaataagatagtacggaggtggatttaatgttagttcctattctcctcgctatcatcggtttaattgtcggtcttggtttgggtttcatggtcgcaaaagcacgccatgaaaaagaaattgatggggcacaaaacacagctagagggatcattacgcatgcaaataaagaagcggaaaccttgaagaaagaagctttgttggaagccaaggaagaaaaccagcagtatcgcgcacaagttgaaagtgagttgaaagaaagcagacaagaattaaaatcacaagaaaatcgcttgcttcaaagagaacagactttagatcgtaaagatgattctctagagaagcgtgagcactcactggaagaaaaagaaacaaagatcagtgctagacagcaattaattgacgagcgagaaaaagatgtagaacaactgattaatgaacaacaaacaaaattggaacaggttgcttctttaacgaaggatgaagcgaaagaagtaattatgaagagaaccgaagaggaattgaaccatgagttaaccgttatggtcaaggaatctgagcaacgtgccaaggaagaagctgatcgcaaggcgaagaatcttttagcgatggcgattcaacgctgtggtgcggatgctgtttctgaaacgactgtttcggtggttacattgccaaatgatgagatgaaaggtcgcatcattggacgtgaaggccgtaatattcgaacattagaaacattgacggggatcgatttaattattgatgatacaccagaagcggttgttttatccggctttgatccaatcagacgggaaattgctcggatgacgttagagaaattgattcaagatggccggattcatccggcacggatcgaagaaatggttgaaaaatctcgcaaagaaatggatgaacgtattcgcgaatacggggaacaagcggcctttgaagttggtgcgcataccctacatccagatttgatcaagattttaggtcgtttgcatttccgtaccagctatggtcaaaacgtgttgaatcactcaattgaagtagcgaaattaaccggtgtgttagctgcagaacttggtgaaaacgttcaattagcgcaacgcgcaggattgcttcatgatattggtaaagcactagaccacgagattgaagggtctcacgttgaaattggcgctgaattagccgcgaaatatcgtgaaaatccggtcgtgattaatgcaattgcctctcaccatggagatacagaagcaacttcagtgatatctgttttagtagccgctgccgatgcagtgtcagctgctcgaccaggtgcgcggagtgaatctttagaaaactatatccgtcgtttagaaaacttagaaaacatttcaaatagttttgatggagttgattctagcttcgcagttcaagccggacgtgaagtacgtgttatggtcaaaccagaagaaatttctgatttggattctgttcgtttggttcgcgatatccgtcgcagaattgaagacgaattggattaccccggacatattaaagtagtggttattcgtgagacacgagcaaccgactatgcaaaatagtcaacagacttagtaaccaaataagagttcaatcgcctatgggaaagattgagctcttatttctttttcgttctagacgtttcagcttggataactcagcgactgataaccaagcaaaaaaaatctctattaatagccataacgaatgtatgataaggtaagtagctgctttaatttctttgcttgcgtagtggataaggaaatagcctttttgtttaagatgttggaaatctctacattcatttgactcagcataaatggaatagggcattcttcttttcttaattcattttgatagttagctaatattttttgtagtgcttgactattttgatctgtgtctaattctcttaggatttctgtaatgagtgcgagagcttgatcgctgcgttcttttccacctgagaaccagtttagttttgacatcatgtttcactccttaattatttactcaaggaggagactgtagattactctttggtctgctggctttgcctaaattcttgagtaaggatataatcacaagatacgctaactcctcattatttgccactgttagcctattcaatattttagaagaaagcttcaacttgaacgtcagaaaactattctaaaataaaaagtactgtcattatgctaataaatagccgctgtatcagtgtgatgttgcttatagcagcaaagaaacatgggcttttagaaaaaatagacactgctatttaaaaaacgcttcatttatttaaaaggatagcttcaaaacaagaattcatttaaaatagagtacaagaaaagaaagaatgggagtaaaaggatgacgacaatcagtcgctggttcaaacggcatgctacattattaaaaatcatcttctttgggattgttttatttttcgtggcgaatcaagtgaaaaatatcgctcatggaatgagttggcaaaccgtttggcaaacgatcaagcaacaggatcaagtagcattattaagtatgtttgggatcggcctttgtggtgttctgcccatgcttttatatgatcacgtggcaatcacgacactcgaagcgacgggacgtccgcgaatgaactttaaagaatggctagtttctgcctggaccactaatacaatcaataatttggccggattcggcggtgtggtcggagtgagtctgcgctctagtttttacggtaaggggatggagaagaaaaaagtactggctgtgatctccaagattgctattttcatgctagcggggctttccatcatggccttcattacgtctttagatttgattatttttcgaacacaaaatccctttgtgcgttatcgtttttggttattagcaggtggtgcttttgcgccgcttttattcatttttgtttatagtcgacgccgtacgatttttaaagagtttcggctgaaacaaatttttgaattgtatctagcatcattgggccaatggttaggtgcgctgatagtcttcttatcggttggctatttgatgggtgtgaaattgaatatcggtgatatttatccaatgtttgtgattgcgactggtctagggatgctgacgatggtgccaggtggcgcgggaacatttgatgtgatgatgattttgggtttggggcatctcgggttgaatcaaagtacagcggtcgtttggatcttgttttatcgaatattttattacctagttccttttataacgggtatcataatttttttgactaataccagtgtcaaaatgaatcgttattttgataatctgccacgtgtgctttcacaaaaatttgctcatgtcattatggtcagtgccgtttattttgctgggattatgatgattctattatctacattaacaaacttatctaatatcagccgcctatttcaagtgctactgccgttctcctttgattttctggatcagacactgaacttattgattggtttcttgcttctgggatttgctagaggaatctcgcaaaaagtaaagcgggcattttggccaacaatcttattattgatttttgggattattaatacggtagcgcggacagcatcggttcgtttgattgttgtttatgtggtgattttattgatcgtctggatgtcacgaagggaattttaccgagaacggtttgtgtattcttggggagcgttggtttttgatgggattttattcggtctgctcttcattttttatgcggtagcaggctatcacagtggtcagatctggagtacggaacggttatcggcgaaatattttgccttcccgtcagaagaaatttggttctccggtttagtcggattgattttatcaattttatgtttagcgatcctctatcaatatttaacgcaaagtgagacaaaactgggagctgcttgggatgagaaacgcttcaactatttaatcaatcgctatggcggcacgcctgctagtcattatttacgagtatcgggctatcagtatttttattatcaagaaaacggcaacgatcaaatcgtttttggttttcagacgcgagcaaataagtgttttgttctgggcgatcctgtgggcaatcctgaaaaatggcaggcggctacttttgcctttatggaacatgcagataagttgggctatcagctggccttttataaaatatcagaagagtacgttctacttctacatgatttaggctttcattttgataagatcggtgagacgggggttacggatttcactcgtcataaacatgatgttttttctgatcgctttgaatttaaacgcttgacaaacgaggggtatcaatttatttattttgaaaatctgccagaggaagtttttgaggagctagaggaaatttcagatgaatggttgaatggtgaaaaggaaaaatgtttctcagtaggccgctttgatcgtgggtacattgaaacaagtaatgttggaattgcacgtgatccgcaaaatcggattgtcggatttatcactgaacagccaatcaataaggagaaggcgtcctttgatcttttacgttttcgaaacgatgtaccgaatgagctgccgacttttctaaagctgcatttgatggatgagttgaaacgacaaggatattgtgaagtatatcaaggcatggcgcctttagccaaagttggcgagacttcttttgcttttttaggagagcggatcatgaatttgatctataaatatggtcattcgatttatgcttttcaacaagttacagaggaaaaaacggtttatgtggatcaatggcgaccaagatatttcgcttatatgaaggatagcagctttttattctcagccttacaattactttatttaattggtcgaggaaagaacaaaggtgtcacgatttcagaagaaatgatcgaagtataaaaagacgagcccgttacggctcgtctttttcattcatgcgtacttcaatcaatcgtgatagatgtacctttcttttcttcgtaatccgttcgggggagtatcaacgtgagcacaccattttcaaattttgcgctaattttttcttcatcaatgcttttcactacaaattgacggtggtatgcactgctagagcgttctcggcggacaaaacgaccatcatcttttacttcattttcgcttgtgtgttcggcatcaatcgaaagtatctcattcgtatagttcacggaaatttctgatttttcaaatcctggcagatccgctttgacttcatagtgatcatccatatcgcgaatatcgacactcatttttcggtcatcccaaaacgtgttcatcagcttgcctactaattcttctccatctaaccaattgtttttcggcagtaggttcatatagtatccctcctcgtaaaatagtttttgtctaatactttttaatcaaaatgcttctgaatcgaaaaatttattgaataacacattccttgcggaatttgtttcgttattgtgtgatttctcagagtacaatggattcatggaaaggatccaacgggaatttgctatgccctcctgtagctttgtctaccttgcaaagtctgttacccgaaccactgttatcactaccaactcattagctgtttcgataatggactagactttcagatagtagtttggaaggcagcttctagctcttttatcaccgtattctattaggcgaggttgtggttacacagtgagcttctgggaaatcccacagtatcgaagcattttccaaaatttagatcgaaaggaggtccttcttccatgaaattatttgtcggtattgacgttagttctgaaaagttagatgtctgtttcctaactgacgacgatcagttgtctacattgtctgaaatctcagtctccaatgacattgaaggtgcttcattaacacgagaaatgattcttgagttcaatgagaattacctatttgatcaaattataattggcatggaatcaacgtccatgtacagtttccatccttcaatgttttttcatgaagacgaggaactaaaaaagctcaatacgcttgtaactatcgaaaatccttttcgaattaaacaatttagacgcatgtttgatgaagacaaaacagatcgtaatgacgcgctaagaattgctgactttctacgcattcaacgttttaccacgtctcctattaaagaagaaaaatacatggcgttacagcgtctgacccgaactcgttatcaattaattaagcaactaactcgtacaaagcaacactttcttgaaaatctaacgtacaaatgcaacacacttgttcgtgaaatgaaagacgaatctactagtctttttagtgctacagtgatttctctaatgacagaagacttcacgttagatgaactggctgagcttcctttggaagctttcagtgacttaatccaagaaaaaggaagaggtcgtttcaaacaacccgagaaaattgccaaggctattcaacgagccatcagatcaagctatcgcttaggcactgtagcccaagaatctattgatattgttctgggcgttcttgtttgtgaaatgcgggctcttgaaaagaatatcaaagagctggataaagcaattgaacaattagttatagtcattccagaatatcaatgtttaaccagtattccaggaattggaaaagtctacgctgctggtttgatcgctgaaattggtcaaatcgaacgatttgaagatcaaacaaaattggcgaagtacgctggattaagttggaaagttaaacaatctggaaactatcagtctcaaaatacacctctgaccaagcaagggaatcgatattttcgttattacttagttgaagctgccaactcagtaaaaaattatcttcctgaatataaagctttttatcaaagcaagtataaagaggtacctaaacaccaacacaaacgagcactcgtcttaaccgcaagaaaatttacgcgtttggtggatacgctactacgtaaccatcaactctacacgccaccaaggagcgtgatagataaataacaatttgttattgacgcaaatccttgaaacgcccgaaaaaaattgattttagtcgggtttagttcagtgcgcttcaaaatagtctattcaataaaaataatctcaaatttcaacttgacttatcaccattagactatttttatattatcctagcatgcaacattactctttctttcatggtaaagcctcaggtggaattattcaactaatttagggcgcctatgctagaatgaattatctatacatttattatgggctatgatagaatcgtctagtgaaaaatttgaacgggtgagaaaatggaaattatggagaaagccccagcgaaaatcaatttgggcctcgatattttaggcaaacgaccagatggcttgcatgaattggcgatggtcatggccagcatcgacctagcagatcgtttgtatttggaagaaattccggaaaacaaaatcatcattgagaccaataaggcttttttacccaccgataaaaagaatcatgtttatgaagcgctagaactggttaaggagcgctttgagataaaacagggcttacgggtcaaaattcataaagaaattcctgtagcggccggtttaggcggcggctcaacggattcagcggcggctttacgagcggtaaatcgtttatggaatttgggattatcagttaaggaattggctagcttaggtgctgaggttggttcagatgttccctattgcgtatatggacaaacctcgttagtcgaaggctttggtgagaaagtgaccccgattgctccaatgccgcagtgttgggtagtggtggttaagccgcggatgagtgtatcgacacgcacgatttttgctaagattgtaatggaggatttatatcatccggatattcaagtgctggtctcagctattgaagaaaatgattaccggaagatgacccaaaacttagggaattcgatggaagtcgtaacaattaaaaagcatccgatcatccagcagctaaaagatcgtatgctgaaatatggcgcagatgctgcgatgatgagcggcagtggtcctacggtgtatgcgctgtgtcataagtattcccgcgcgaagcatgtgttcaatgcgctgaaaggtttttgtgatgaagtatatctagtgcggacattaaagtaaaaaatctgcgactaaagcatttttccaacttttggaaaggtgctttttcattttaacagttttgaaacaaagtggcttttaaacaaaaaaagtagacggctatcttctatgatgtgttagataaagtttcatttaatggataaaataacgttcggagaaaagaaaaacgaatacaggtttgatccttcatatgaatgaaatatcatttatattacggtttatcagccttattcgtattcaaatcgtaatttttacgttttgtgttgacggatagaaaaacatctgttaaattaatctttgtcttaaaacgagaagagaaggtgtttagatagatgaagatgcaaaaaggactacttttactaggaactgtggtactatctgttttgctgactgcttgcggtggacaagagaaaaaagaggcctcatccaatgaaaaaattcaggtgatgacgacattttacccaatgtacgaattcaccaaacaggttgtaggagataaaggcgatgtagaattgctgattcctgcaggtaccgaaccccatgattttgaaccatcagccaaagatttggcaaaaatttcagattctgatgtctttgtctataatagtccagagctagaaacgtggacagataatttgacggatacgattgatacgaaacaaacggaaatcattcaagcttctaaagatatcaaattgatggaaggcacagagcatgaccacgaagaagcacatgatcatgacactcaggaacatgaagaacacggacattcacatgaattagatccccatgtttggttggatcctgctttggcaatcaaggaagtcgaaacaatccgtgatcagctaagtaaaaaatatccagatgacaaagcagcatttgagaaaaatgcggcaagctatattgatgaattaaagaaattagatgaagagtttcaaacagcatttaaggacgcgaagaataaaacctttgtgacgcagcatgcggcatttggctatttagctaaccagtatgggttaacccaagaagcgattgccggcatttcccccgatcaagaaccgtcaccaagtcgtctgagcgagttgaaacattatgtggatgacaaccaagtgaaggttatttattttgaagagaatgcttcttcaaaagttgccgagactttgtctaaagaaactggcgtgaaattggaagtcttgaatccattagagagtttgacagataagcaaatcaaagatggtgaagactatctttctgttatgcgagagaatttggccgcattgaaggaaagtgttcattagtaaaaggagcgaaaagaatgtcgtatatcgaggtagaagacctctcattctattatgacaacgaacctgtattagaaaatgtgtcctatcatgtggaccctggcgaatttgtcattttaacgggagaaaatggtgccgcaaaatcgacattgatcaaagcgacattagggctattaaagccgagtagcggaaaagttatgattgcaaagaagaatgccgaagggaaaaaattgagcattggctatattccacaacaagtcgcatcgttcaatgccggttttcctagtaccgttttagaattggtggaatctggccgctatccacaaggaaaatggttcaaaaagttatctgaacgcgaccatgaacatgtacaaaaggcgttggagtcagtagatatgtggaatatgcgtcacaagaaggtaggagaattatctggtgggcaaaaacagcgaatcagtttggcacggttatttgctaaagatccggatttatttattctagatgagccgacaacgggaatggatgaaaaatcccgcaatgatttttataatttactgcgccacagtgctcatgtgcacggtaaaagtatcttaatgattacccacgatcatgaggacaccaaaaaatatattgatcgccacattcgattggtacgaaaggagaattcaaaatggcgttgctttcatatgaattcatgagacgtgccttcctggcagcgatttttatcgccggaatcgctccaatgctgggagtctttctagtgattcgacgacagtcgttaatggcggatactctatcccacgtttcgctggcaggagtagcattaggcttcttcttgaatttgaatccgacgggaacaacgttgttagtagtggttgttgccgcaatcatcatggaatatttacagaatatgtatagctcttattcggaaatttccattgcgatcttaatggcagccggcctagccatcgcattggtattaatgagcctggctccgggaagctcggcagtcagcatccaatcgtatctatttggttcaatcgtgacgattacttggcaacaggttatctttttaggaattctctttgttttagtcggtattttattcctgctattcaagcgacctatgtatgtattgacctttgatgaagacatcgcggctgttgatggtctgcctgttcgtatgatgtcgatgattttcaatgttgtgacgggagtagctattgcaattatgattccaatcgcaggagccttgttaatctcagctatcatggtattgccagcggcaatcggtatgcgagtaggaaaaagttttaacattgtgatcttcgtcagcgtgcttgttggctttattggaatgattggtggtctgactggttcatattatttagatacaccgccgggtgcgacgatcacacttggttttatcttattgtttttagtaatcaatggaatccgtcagttgcggatcttggttcagcgaaaacagatgcaaaattagaggaaagcgaaagcttttcctctttttttgcaaaataattaataaattccgaacttttaaactttaaaacaagaaaatgctcgaattttatcagctaaacccttataatgggaaacgataaatcagaataggcgatcatctgctttttctttataagagttaagcgatgataggcattgagcatcaacctttttcaccaagaaaaaatacattaatacgaaataggagtgaattacgtgaaagtgcgtcgaagtgaacgattaatcgacatgacacaatatttgttggatcatccacatgacttgatcccattgactttttttgcggctcgatacggttcagccaaatcttctatcagtgaagacttagcaattgtaaagaaaaccttcaaggaacgaggaacaggctttctagaaacgattcctggtgctgccggcggtgttgtctttacaccaagtattacggatgcagaagcacaggaatatatcgaatctttggctgagcgtttgtctgaagaggatcgtttattgccaggcggatatgtatatctatctgatatgttgggtcagcctgacttattacgtaaagttggacgaatcattgcggcgcaatatttagataaaaaagttgatgcagtcatgacggttgctactaaaggcgtaccaatcgcgcaagcagtctcttattatttgaatgccccattcgtaatcgttcgtcgcgactcgaaaattacagaaggttcgacagttagtgtgaactatgtttctggctcatcagaacggatcgaaaaaatggagctgtcaaagcgcagcttaaaacgcggttcaaaggttttgattgtggatgatttcatgaagggcggaggtaccgtcaatggaatgaagagcctgattgaagaatttgaagcagaacttgtaggaattactgtctttgctgagtctaagtttaaaggcgagcgggctattgacgactataattcgttgctatttgttcaagacgttgatactagtacgaaaactatcagtgttgtacctggtaattgcttcaataaatagacaataagaatgctaggtttttaagactctctctagtttttttctttgagagagtctaatgagctagccttttttgcgtgtggctagtaaaatggactacggatttcaaatatcaatggtaaatttaaaatgaatagaatgaaataggagtgacttcttttggaaaaccgttatgcgattattttagcagcgggtaagggaacccgcatgaaatcaaaattatacaaagtcttgcatccagttgcaggaaaaccaatggtggaacacattattgaacgggtggttgagacacagccaacagacatcgtaacgattgttggtcacggcgcggaaatggttaaggaacaattgggtgatcgtagccgatatgcgttacaggcagaacaacttggaacaggccatgcggtgatgcaagcggcagaatttttaaagggcaaacaagggacaactttagtcattagcggagatacaccattacttaccacgcaaacattgaacaatctatttgattatcatcaaggcaaaaaggctagtgcgacgattctgactgctcatgcagaagatccaacaggctatggacgcattttacgcgaccatgtcggcatcgtggaaaaaattgttgaacaaaaagatgcgactccagaagaagcgcgaactcaagaaataaatacaggaacctattgctttgataatgaacagttatttgcggcattagaaaaaataggcaccaataatgcacaaggtgaatactacttaaccgatattgttgaaattttaaaaaatgacggtcaaacggttgcagcttataaaacggatgattttgaagaatcgctgggtgtcaacgatcgaatcgctttagcgaatgcgaatgaattgatgcgtcgccgtattaataagcagcacatggttaatggcgtgacattcattgatcctgcgacgacatatattgatgctggtatcgagatcggttctgataccattatcgagccaggagtgcaaatccaaggaaatacagtgattggctctgactgtgttattggtgctcactcgaaaattgttgatagtacaattgaagacaaggtggaaatcaaatcttctgtcatcgaagaagcaattgtgagaaaaaatgcggacgttggtccacacgcacacttgcgtccaaaagcagatattggtgaaaatgctcatatcgggaattacgtagagatcaaaaaagccacgattggtgaaaataccaaagtaggccatttaacttatgttggtgatgcaactcttggaaaagatatcaatgtcggctgcggtgttgtttttgttaattacgatggaaagaacaaacatcacaccaacgtaggagatcacgtctttattggttcgggaaccaatattattgcgccagttactattgctgagaatagtgtgacagcagcaggttcaacgattactgacgatattgctgaaggcgacatggcaattgctcgtgctcgccaagtaaacaaagaaggttatgcgagtcgattgccattttaagggaattctcttgatttcttaaaaggaaatgactagtattttatttgaaatggtatataatcggtagcgtatgcttaaaaagaaagtggaggtccccatgtcgaaacattattttgatccaagattgaaaatttttgctttgaattcaaatcgtcccttagctgagaaaattgctgaagaagttggtgttgaactaggaaaaagttctgttacccaatttagcgatggtgaaattcaagtaaacattgaagaaagtattcgtggctgtcatgtttatgttgttcagtctacaagtagtccggtaaatgataatctgatggaacttttgattatgattgatgccttgaaacgtgcgagtgccaaaacaatcaacgtcgtaatgccttattatggttatgcccgtcaggatcgtaaagcacgtgcgcgggaaccaattactgctaagcttgttgcaaacatgatcgaaaaagctggtgcgacacgtttattgactttagatctccatgcttcgcaaatccaagggttctttgatatccctgtggatcatttaatgggtgcaccattgattgcggattacttcttagaaaaaggtatttgcggcgacgatgtcgtggttgtttcacctgaccatggcggggttacacgtgcacgcaaattagcagaattcttaaaagcaccaattgccatcatcgacaaacgccgtccgaaagcgaacgttgcggaagtgatgaacattattggtaaagtagacggcaaaacctgtgtcattatcgatgacatgattgatactgcaggaacgattactctagctgccaatgcgttgaaagaagctggcgcaaaacaggtctacgcttcatgtactcatccggtgttatcaggtccagcaatgcaaagaatccaagattctgcgatcgagcatttagtcgtaacagattcaatctacttatctgacgaacgtaaaatcgataagatcgatgaaatcagtgtgggtgaattaatgggagatgcaatcaaacgtatccacgagaacaaaccagttagcccactatttgaaacacataaaaaataaatctattgtatgaggtactccagctggggtgcctctttttgtgtctaaactattttggctctaagtcaaatcgtgttgttttcattaaatcactgaaaggaaatgcttcggcgtttccttttttctttttgtttttttgttcaaataatatcgcaaagattctgttgaatcagaattcgcatacgaaggtggcgaaaggttctaaaaccgaatgccactctcttaatcactttaatcaagttattcttcccttcaagttttccgttcgaataggggtattttaacgcattgataatcgcttgtttgtgtttgtttaagtaaagaatcgcttttttaaatgctggatcaagcatcggaggtaagtgatcaatgcgttcgtaaaagtctgtataatctttggcatcaaaggcatccaacaaattttgatacacatcatagcttgtccgtaagcgctcgtcaatcgataataaataatccaatacttccgattccgtcaggtatttccgttggaaaagcgggtattgtttgagcgaagaataattaatttttctattttttttcagaatggttcgccaatatttcttaagcttgcgatactttttcatggcttgcgggtcgctctttttcaagtgattcatggtttttatccgttgtttgttaaacgcacgattgagttgttggatcacatgaaatcgatcaatggaaatccgagcatttgggaaaacgacctttgtcacagaatcatagcccgcattcatatccatcacgacatgagaaacgtttttccgtgcgtgataagtaaaacgcatgaaataggcgatcagcttgaagcttcttcgatcctctaaaatatcaaagattttccccgtgtccgcgtcactgagaataaaacacatggcgccctgacagtccttagttcctttgaattcatcaatcaagagatgtttgggtaagtaattgggcttcagtcgtggttcttcaaaaaaagaatccaagacccgttcgaccgttttagcggaaaccaagtaacgttgagcgatatctttcatcgaaattttcttctttaaatcaacagcgatcgcaaacttgagcgcttgggagagataacagttttctgcgacataataggttttagctgaaaaggtatggtgacactgtttacaataaaaccgttgtttatagagatgaagataggtagacacctcttgataagggagtaattgaatccagctatctttgtagccatgatggatgacggagtcgtagccgcaacactcacaccgaggagacggatagctcagtcgaccagtaaagacggtggccattctgtcatggactttttcttttgaaacggcgtctttaggaaaagtaatgttggaatcatgaatatttaggatttgtttgatggttttgtctaggcaattatctttatatttgatattcttaatactggacatttggttcgcctcctatgattgggttcagcgatttaattataggacaaccaaatgtctttttgtataaaaaaatacttggtgttctcactcagaaagagtaacaacaccaaatattatagaaccactatttttgaaaattttgttgatcaaagaaatttgattaaacgctttctcacttgatttcttctgatatgataataagtagaagaaggaaactggggaggacaacatgcaaaaaagaatggatcggatttctatggctgcgggctatggaatgctaataatcgctgtatttcttaaaataatcggtggtgtgaatcagcgattcagcttggttgaggtctggattcgcagcttaattagcggaaattttctgcatttttggcaaacggagttttcttcaggcatcggtgtattagttggcacaggtgcgtttctgttattactgctagtctacgtctttgacagcttattgataacctgccatcgaaaaatcgtcctcttgcaatctgctaaagttgcctggctctatttcacaatgttcttctattttattttcattcaattctattcaagcagcatttggttggttctgcttcttataatcggagcgttagaatttcttttaaatcgctatttggatgataaaatcgagcgagatcgaaaatatgctgagtcgcagaaaatcgaaaaacagcgcaacgaagatcgtaagcgacgtttggcttttccaggaaaatatccaccagcattccatcagattattcgaaaaaatttccgtttctatcgtaaaaactattttttactgatttttgcgaataccttagttttctttgcattagtaattctttttttcgcctatcagaaatttagcggcagtcacacccaagagacagttttcaataaaacgggactcctacgtattttaatcgaatccggcggtgttcttctaatcttgttattattgttcttatcatttatggacggcttatatattgattttaaggcaaagcacatggaattattcattcagctgggaatccgcaaaaaaacgtttctaattatgctgattgaagaatttagtctttgtgctttagcgggagtgttgattggaggaagtcttggcttactgattactagagcatttactagtatcggttgggccttattgttatacacagggttaattatcttggcgatggccttccatcaggaaaaaatcttgcgtttgattcaatttaggccgcgggagcaaacaaaaccagaccggccgaattaccgttggacaccactatttctgttaattggcctgctggcactaatcattactttctggtggttccatcgacggaaatctgctgagactttgttagttattagtacgctaatcattgctttgtgggggctttttcttggtattggcggtttttatgtaaaacgtagacgggaaaaaatcaccctcatgctttctcgcaatgatttattctatcgttttcacaaaagtatcaatgttctcatgttagtgtcccttttacaagttttgataacggggatctttctgcctcgcgtggtcacttttcaacaaactgctgtcgacaatttatttccatatgatgtggtagcgaaggtcaaatcaacagaatttcaacaagttgaaacatcgttgaatcaggaaaaggccctgtggaaaagctatcctttctttccagtaacgtctgtggacggtgatccggaatgggaagtttttggtacggtgcggccggtgatgtttattcaaggacagcatattggagtgtctgaaacaacttatcaacaactacgacaggcaaatgatttggagaaacaacctttacatttaaaaaaagggcagtggcatgtcgtttatcaacaggcaattagtatccgtggacaaccgatcgattgggacccgcaaagcgttcgaccgcggttacgaattgggacaccattagagagctacaacacagccaatgtcgatgtgattttcccgatgcgtacaatcaaaagccaagaacgcttgatactaactggaatgtttcaacgtggattacaggaaaatattctagttgttgcagatgaagaatttgcgactttatctaaaaaagatcaaccaaatcagttgtttttgattcacggagataaaaaaattgctcatgcattaaattttttaaatcaaaaatatgtagacgacaagcgttgggatgatacgatcgaacctgtatatgaaaagacgcaacggaaaagtaatgttgtctctgaaaattatctacaagtcttgcttttaatctttactatagtcatctgcatcttcatgagtgtgggattgatagtagccaaatttgaaagcgaagaaactcgtttgatcgaacgcagacgactgttggatcaattaggtatgagacagaaagaacagcgaagtgttttgaaacgtcaggttggatttttcacagtcttgccattagctgttggttttctgctcagtctgggttttatcggaatcatgggaagactgcgcttcttctcgatgtcagaatggctgcagttcggaggtatctttttattggattttgggatttacttattcgtatggggaactatcgcaagtttgatctaccgcagaattgaaaagtggaggtaagcaaatgacgccaattatcaaagccgcaaatattactaaaaattatggacagcaagaagtcttaaagggaatcgatttgctgatcgcccctggcgattttacttgtatcatggggcgttctggttgtgggaaaaccacattattgaaaatattggggctgatgcatccaccaaccactggagatgtcttttttgaggaaagactaactcatgaactttttccagatgaaatttctgacattcgcagaagaaagattggcttcgtttttcaggatttcaatttgatggaaagtatcactgtgcgggaaaatattcttttacccgcaattttggataagcaagacgttacaaaatcggaagaacgaatgcagccattctttcaagtgctgcgaattgaacatctattgggaaaacttcctcacgagttgtcagtaggagaaaaacaacgagctgcgatttgccgagcattgataaatcagccgcaaattattttagcggatgagccaactgggaatttagacagcaatgcgggagccgaagtaatcaacatttttcagcgtattaatcaagaattaggcatcaccattgtcatgatcactcatgacagcaaagttgctcaagcggctagagaggtcatctttttaaaggacggtcaaatctatgatcgactaatcaatactgctggaagcgaagctcaaatcgcagagaaaatgttggaagtttaattgaaagataaaaacaagagagtgccctgaatatcaggcgctctcttgtttttattactactactggcaacctgtcaaaaagacaaaaaaagggctcatcggtgggtggccgatgagcaaaggagttaaaaaatgaaaaagtgttagggttgtttgttggtatgtttatataatagcaacgatatgtgaattatttatgaatgaagcttggcagaagattaaaaaaaataggtcgaaataaagttcagcagacattgagcagtaaacagtgaaataaatgaggtttctccgtagtatacgtggatcgtttagttagccttgttgatcatttgaaggagcaaacaaaaaaagggctcatcggtgggtggccgatgagcaaaggagttaaaaaaatgaaaaagtgttagggttgtttgttggtatgcttatataatagcaacgatatgtgaattatttatgaacgaagcttggtagaagatttaaaaaaataggtcgaaataaagttgagttattcattaatagttagatcaaaaaaaataattaaatccccttatatagttatttcattcatatgttgaagctttatttcattgtgcagctaaacttctaaaggaatcatagaacaaatctaaacaaaaaaagagctcatcggtgggtggccgatgagcaaaggagttaaaaaatgaaaaagtgttagggttgtttgttggtatgcttatataatagcaacgatatgtgaaaaaagtgtgaacgatgattgtttgaaaattaaaaattttataaaaaaattgaatattaattaactcgacaaaaatattataatttattttcaaaaaaagagctcatcggtgggtagccgacgagcaaaggagttaaaaaatgaaaaagtgttagggttgtttgttggtatgcttatataatagcaactacttatgaataaaatatgatgaaagactagcgaaaccattaatttataaaaaataaaatacagaaaaaattatagggtttcacaccattattttagaattttataaattatccaattatattaactaaaaggagttgttataattctttatcccaataattttatgaaatgaaaaataaaaggtaaagaggttgtgactgaagtggttagcttcaaaaaggagtttccaaaaatacaatgacgtaggaagggatgttgaatggtacctactcgttgcttttcgagtttatgtgagattttggcttatttttctaaatagctacttctggaacatcaagaacatcgtttattcagaaaaaagagctatgacaagacttttatcatggctctctcgtttttaatagcaattattcataaacatggtttttcttgtcgtaaatattacgcaattctaaatataatggaacaagctcgttttttgtataaggaaaatccagttggaataacggaatatttggtttttcctttcttaatagtgaggaagagctgataatcaaatcataatcatccttcagtgatacatcgtatggctcagcatcaatgaagcgcagatcctcaaggaaacgatacaaatcacgaacgaaaatcgcattatgttctaatgcaataccaacttttagattatgtgcgtaaggaaattgattaaagtaaggcaataacaaacgcttaaaggctcgagtaatcatcggatgaaccgaactgataaagctgtaggatggattttccttcgtcatttgcatgaaattttgaatgttctggaataaaatatattcaccgcgagtttgtttagcatttgggtctaagactaattcaatcatgcttgggaatggctggcggaaaataaagtaaccaaaggtgatattcaacatatttgaaacaaccaatggatcatccatgatgtcgggccgatccgggaataagactttcttagcaaagttccgaaattccgttacaaaatcatttactggatttggacgtgaatcaaaatcatggagtgcttgcttcatactttgatcgtcacgaatcgtatagaaaggtgaataatgagctaagaaataaataaaactggtttcaccctttaattgacgtgttgtcattggcatgtcaattagatcgcgtaatgatgtgaaatcataatatggattatccttcatcaaaaaattgtagcgaggatcatattttgtgaatttctttttctgtactcgcaccatattaatgctagtaaataatttgatttcttgagtaccaaagtaagtttgtgataacggaaaatagtctttataggtatcaattattttagttaattgatgtttgtcaacatttattggacattcaattccacgagttcccagccataaaagatcaaataaagctaaacgaatcaaacgttcatcgccggacataccggcctctgtatatgtaaagcgaatattgaatcgtttcaagtgttttttcaatttgtcgattttccgagaaactgtggaacgactcacaaaatacttttcacaaaattgttcgattgttggattcgcatcatttaagaagtataggatgaactggaatggcactgcttgctgcagtaagtgataacgatattcatcaaccgtggcattgaggttttctagattcagtttgccggcacgcatcataattgtttcgtgatccggtcgtatttctgctaattcctgatctacttcattcagttcaatgacgctttgctggtaatttaaatctaaatcttctgacaattgactaatcgctaaaatctttttggtagattggtttaagtatttaaaaatattaaaacgcaagaggagcgacgcatcaaacataagttcctcatataacatctgttttcctcctttattaaattcggtcattaatctgaatttttttaagcatatttcttctttattgtactttatttaccaaaacctgtcagttattaaccgataaaaagtgagtaatattatatagggaaaaacaattttcatgctattctaagaaagtctagtggtaataagtcaagataatttttcaaaagatttttaaaggtagttaatttttgaagcgcactgaactaaacccgaccaaaattaaaaattttttcgggtacttccaaggattagcgtcaataacatactgttatttatctatcacgctccttggtggcatatagagttgatggttacgtagtagcgtatccaccagacgcgtaaattttcttgcggttagtacgatggctcgtttgtgtttatgcttgggtgtttcagcgtattttttcttataatacgcatggtactcaggctcgtatctccttacggagttggtggcttcaactagataataacggagataacgattgcctcgtttggccataggagtattttcatactcagagttacctgattggttctgtcgccaatataaaccggcatatttagccaatttgctttcatctgaaaagcgattgatagggccaatttcagcgagtatacccgcagcataaacaggaccgattcctggaatactggttaaacattgatattcaggtagcacaacgactaaatcgtcaatggctttgtctaagtctttaattaacttttcaagactacgaatttctttggctagaacacccaaaacaatatctacagagtcctgatggacttttcctaaccggtaggaactacgtatggctttagaaattgcctttgcaattccttcgggatttttaaaacgatacttccctagtttttgaattaggttcgcaaactcttctaatgacagttcggcaagttggtccattgtgtaatcttccgtcattagagttactaatgtggcacttaaaacggatccaccttctgcttttagttctttagaaagcgtgttgcatttataataaatgttttcgataaagtgttgctttgtacgaaccagctgtttaattagctgataacgcgttctagttaagtgttggagggcaaggtattcttcctctttaatgatggagttgacttgcctttggatgcgaaaatagtcagcgatataaaaagcatcaatttgatcgtttttgttttcttcaaaaatatcacgatactttttaattttatttggttgttcaactgaaaccataaggttcaattgatttaactcaagatcttctttaaaaaacatagctggatgaaagctatataaagatgtggcctccattccaatcactaagctctctatctcaaatttttgagaaaattcgagaatgtattctttgatctggcttgcgccaagttgactatttccataagatgcttcttttaaaacagagcaagttgaatcgtctgtcataaagcaagcatctaatttttcagaactaacgtctaaaccgacaaatagtttcatgtggaaggacctcctttcattgattattcggaaattgcttgggtactgtgggatatcccagaatcacgttgtctaacgacagcctcgcataatagagtttcattcattaaacctctaagccacccaatctctactaggattggtagaggtcaatggactcagctagtgtgttggaggttataccaacggttcgggtcacagactttctgtcgcagtaaaactgcagaaggtgatagcgtcttcccgtaagtcctttccaagacttattattcaggaatatcctacagtatccaagtagtaatcgttattttatttaaacatattaggaatagcccctaagggcgattgaaggaatgaaagtttcttcaaaatatatattacgagaaggtgaaaaaatgacaaagtcgcgtttagaagcatttaccgatggtgtcgttgcgatcgttttgaccgtcctggttttaaatattcaaataccagatgcaccatcactagcttccttattaagcataaccaatacactgttcgcctacattgttagttttatttttgttgctgtcatctgggtgaaccaccatcgcatgatgcaaatgactgaaaaaataaattatcgtgttatttgggcaaatattttttggttattttggctgactttatgcccagcagtaaccagttgggtgggtcgtaatccaaaccatttttggccggaattttcttatgtagtggtcttcacgatgtggagcttttcatacggtatattatcaaagcaattgattaaagcaaatagccctactagccacgtggcgactattttaaaacgagatcaacgaagcaaattatccatgctgattaacttagctgttttggcaggtgtttttatttttccgccaattggaatctttggtcgctttttggtttctggcatttgggtggtttcttatcgtaaagcagatgaatactatcaaaaggtattggggcaaaaaaatcacggcagaagctgagaacttctgccgtttttttaagcttgtggatgtaatacacggtgtaaaaattctttagtccgtgcttctttaggattgccgaaaatgtcttcaggcgctccttgttcagcgatcacaccttgatccatgaagatgacacgatcagaaacctctttagcaaaggccatttcatgagtaacgattaccatcgtcaaaccgctttctgctaattttttcataatctgtaacacatcaccaaccatttctggatcaagggcagatgtcggttcatcaaatagcataacttctgggttcatggataaagcgcgggcaattgcaactcgttgtttttgaccaccagatagttgcgcgggttttgcatcgacaaatcgatccatgcctactttttccaaattatctaatgcgacctttttcgcttcagcttctttgcgacctagaaccgttacctggccactcatacagttttgcaaaacgttcatattgttgaagagattgaacgactggaacaccattcctagatgggtccgatattttggtaaattgtatcctggagctaaaacattctctccttgatacatgatcttaccatctgtaggagtttctaataaattgatacagcgtaggaaagtggatttccccgaaccagacgcaccgataatggttacaacttctcctttgttgacgttcatactgatatcttttaagacgaggttatcgccgaagctttttttcaaatgttcgatttcaatgatactactcataactgttcctccttaatgatttactgattatttatcttccccaacagctacatcaacatcgtctaaacgcacataagctgatggaccatccatttttttctcaactgctcgtaagattcgagtcgctgtgaaggtcaatacaaaatagatcacacaaatgatgaagtaggtctggaagaacatatagtttgttccagctgctgattttccttggaagaacaattcggaaacagaaatgatacttaaaacagaggtatctttgatattgattactaattcatttccagtcgctggcaaaatgtttcgtaatacttgcggtaggacaaccttacgcattgtttggccatgggtcataccaatggcgtgtgcagcttcaaattgaccttgatcgacagcgaagattccgccacgaacgatttcagacatgtaagcaccagtattgattgaaacgataaataaggcagcagcggttcggtttaaatcaattccaaaggccatcgcaattccgtaataaattacggcagattgaacgatcatgggtgttccacggaaaatctcgatataggcatttagtaaccagccaaagactttttgcagcccgcgttttgcgctgttgtctgattctggaatggttctaaagacgccgacaagtaaaccaatcaatgtaccaacagtcgtcccaacgattgcaagtaacagggtcatacccgtaccacgcaagaacatcgaaccgttctgtttcaaaatacgaacaaatacattctcttttttacctgaagcgctttgcgtttcatcggtagctggttgatctttaatggcttggtccataacttcgacacgctcgtcttgtgagatgtccgccaggatctggttaacttgggccatatcaggatctccttttcgcatcccgacagaaacttgcacatcctctgggttagtttggaatccattggctttgtcgaattcgaccatttttaaatcagggttaacactttccgcagtcacgccttcaggtcgttcactgacgtacccatcgattgtgcctgactccaaagcgacccgcattgctgggaagttatccatggcttcctgtttgttgacatcagggatttgagggataacatcataatgaaacgtactcaattgcgcggtgacctttgcaccagcaaaatctttgatcgaagttgctttggcatatttagtatctttgcgggtgacaataactaattgtgattcataatatggatcagaaaagtcaacttctttacgccgttcggctgtgggagacatcccagcaataatcgcgtcgatcttcccagattgaagtgctggtaacagaccatcccattcggtttttaccacgactagtttacgattcattttatcagcgatttttttcgccatttgtacgtcatagccgccagcgtaggctttatcgccttgaatctgcacggcgccattccgatcatccttttgtgtccagttgaaaggagcgtatccagcctccataccgacccgcaattctccttcaggtgttttttcatctgcccgagtgactaatggggctcctagaaatgaaataaataatgcgatgagtgcgataactgaaaattttcttctattcataatttctccctttcttgaaattacgagattgggtagggctgtctttgaaaatctgcaacaaaaaaagccgccgattcgtgtataaggccgcttgcagataataagaagatgatgttccctctcacaaaaacatagcgcaacttagcatcactgctaagacagtccgcaagttattcgcttgcgtcccaacatacaaaataaagagaattttgtacatttcggcgaaacttcctagtcctatttcaacgtgtctctacactccatagggttaataaggttcgcgacctctacctcattgttctgaggcatctcgtattcagttattatgtttcacagtctaaaggctgagaatgaaaaagtcaatggaaatcatttggaataaacaaaaaaggtggttgaattttttaaattattccattcgaattgttcagaaagacaaagaaatacgttaaagaagctttttaagaataaaaagataacttttatcattttgacagcccttctccatttaaccgactaatcgagagcggttttctaaaaaaatattgattaagggataaaatcgtaaatcgctaacaaaggattcgtttattcagataaggactttttattttcctctaaatttatactatactgattcttgaggtgacgaaaatggagatcacagttgatcaagcagtaaaaataattcaagaaaacagaaaaatcacatttttaacaggcgcaggcgtgtctaccccttcaggtgtgccggattatcgttcgttacaaggcgtttatcatggtcttgaagcaccggaatacctattaagtaatgagtgtttagttcgtgaaccagaaaaattttatcaattcgtcaaacatttgtatcataaagaagcacgaccaaatagtattcatcgtgagatggcacaaatggagaagacgaaggatgtctgggtagtctcgcaaaatatcgatggcctgcacgcggctgctggaagtcaacacttggtgaatttccatggttcgctttacgagtgctattgtcgcaagtgtcagcggtcagtagcgtggcaggattatctgcaaagcgatcgtcacaaagactgtgatggtcaaattcgtccgaaaattgttttgtacggtgaaggatttgaagagtcagtcatccagcaggcaatcggagctgtaaaaaatgccgagcttatagtgattgcaggaacaagctttcaagttcatccattttgtgatttaatttatgaaaaaagcaaagatgcgaaagtagttgtaatcaaccaaaccccgattcaattagctggcgaatactattttgtccagacggatggaacagcggtttttgaaaaagtatagcgattttgtcgctgcgggataacaacgatttatgatcaattgggagggaactgtgtggagttaacggagaaggaaaaaatgattgctggtaaattgtattttgcaggcgatcctgaattagtggccgatcgaagagatgctcgtttaagattacgtgcgattaatcaagaatcagatagagaaaagcgtgaagaattcgtaaaacaggcgtttggcgggacaaagaaccatgtctatgtagaaccaacgatttcttttgattatggctacaatatttttgtaggtgagaatttttattgtaatttccacaacgtctttttagacatttgtccgattacaatcggtgataattgtatgtttggaccaaatgttcaattgtatacggcaagtcatccgttagaacctggaaaacgtaatagcggtcaggagtttggcaagccgatcaccatcggcaataatgtttggattggtggctcagccatagtgactccaggagtaacagtaggggataatgtagttatagccgcgggcgctgttgtaactaaatctttcccagataatgtagtggttggtggaaatccggcgcgaatcatcaaaacgatcgaagaggaaaacaaagacgatgtactgactaatgcacgaaaaaaaattgatcggattgatcaagaaatcgtgacgcttttagaaaaacggatgtcagctgtcagcgaagtcactgcgtataaagctgaaacaaagaaagctgttttagatactagtcgtgaagaggcggttttacaaaaggtttcggatttagtgaaagatgagaattatcgtgagacaattgttgaaaccttcaaagacattatgaaacagtcaagaaactatcaagaagggcggttgagataatatgatcgacggcgatagacgtaaagccgagattttaaaggcgctgcaacaagctgaaaaaccgatcagcgctacaagctttgcaaaagaatttggtgtgagccgtcagatcgtagtcggcgatgtggccttattacgagccgcaggggagaatatcatcgctactgctcgagggtatttgttagaacgcgaatcagcgaaattaatcagtaaaattgccgttcagcattctcctgaacagacggcagaagaattacacacaatcgttgcacacggtggtgaagttattgatgtagtagttgagcatccgttgtatggagagctggttggaggcttgcatttgactactcaacaagatgtggaggcctttgttgcagaagcaaaaagactcgaagtgactcttttgtctgagttgaccgcagggattcatctacataccatcgcatatgaagcaatagagaatttaaccgaaattaaacaagcactttcagaaaagggtattttatatgaagaaaaccgtcacgtgtaaacgtgacggtttttgacagtcgaacttttttacagcaatctcttaggtgagactaatttaacggtttaagtcccttaaaagaaacaagtggtttagttcgatgatatgcgtagtgagaaaagtattcaaatttcatcggaaaatgtacaccttaaaaacgaattagcggttactcgataactaagacgccatcttttaagtgcaacggatttttttcattgatatggtcatagaacatgatgccattgatatgatcaatctcgtgttggaccacgatcgcattatagttttttagacgaattttatgtttctcgcctttttcgtcaaaataagaaacagtgatacgcgcggcacgaacgacatatccaggcacttcacgatcgactgataagcagccttcgccttctcccaagcaagcttcttgaactgagtggctcaagatttttggattatacatcaccgtactaatgccgttttccggtttttcaggatcgacactaggaacatgcacggcaatgatccgttttgaaatatctaattggggcgcggctaagccaacaccgccacgtaggtttaattcttctgcttttacaggatcttggctattttttagaaattgcagcatttcctttccaagctccacatcttcagcagttggaggaatcgggacttcattggcaactgcccgtaaagtcggatggccttcccgaataatatcatccattgtgatcattaaaaaatctcctctcaagacatgatttcatcacgttagtttaacacaaaaagtaagtaaggtaaaaaaactgttttcatgaatacggttctttaaaaaaattgtaatgattctagaaataagcgttaaattggtatacagcttgattttttaatacaaatcgagtaaagtgttagagtgtgcatagcgcaccacctatcacttggttgggcgattcaccaacgctctactcagtcgtaggaagaaaaaaaggaagaggtgaaaaaacatggcattatcaaaagaacgtaaaaacgaaatcatcaatgactttgctcgccatgaaggagatactggttctccagaagtacaaatcgctgtattaacggaagaaatcaatcaactaaatgagcatgcacgtgtccacaaaaaagaccaccattcatatcgcggtctaatgaaaaaagttggtcatcgtcgtaacttgttggcttacctacgtaagaacgaagttcaacgttaccgtgaattaatccaacgtctaggactacgtcgttaattcgtactactattaaagtgaggttcctaggaatctcactttttttgacagttaggcttttcgcagtagcgaaagtgtgagttctttcaatagttttatgcactgtattgaacaggtagtttagcctaatgttatgcgtacgaaaaccaactgaatttttacgttagaaaaattcatacagtagtaatgagctagctgctaattaaactttccccagttcgcaaggtttgattatagtaaatttagcagagacaatcctgagcttgactcagaaaaaataaaaaacctttgattggcgtgttgtcactctactaaccaaatgcaagaagcgaagtttttcgctgtttccatttgtttagtagcgtcgcactggtcaaagggaaaaggagaagttatgtcagaaaaacaagttttcaaaaccacttggggcggacgccctctgcaagttgaaatcggtcaacttgctaaacaagccaatggcgcagttttagttcgctatggcgacacagtcgtattgagtgcagctgttgcctcaaaagaagcaaaagataccgactttttcccattaaccattaactatgaagaaaaaatgtatgcagtgggtaaaattcctggcggcttcatcaaacgtgaaggtcgtccaagtacagacgcaaccttgactgcccgtttaattgaccgtccgattcgtccgatgtttgcagatggattccgtaatgaagtccaagtaacgaactttgtgatgagtgtagaacaggattgctctccagcaatggcagcgatgtttggttcttcgttggctctagccatttcagatattccgtttgacggaccaatcgctggtgtcgatgtgggtcgcgtgaatggtgaatatgtattgaatccgactgtcgaacaacatgctgaatcagatatcgatttaacagttgctgggaccaaacaagccattaacatggtagaatctggcgccaaagaagtttctgaagaagacatgcttggcgcattactattcggatttgatgcaatcaaagaaatggtggctttccaagctgagatcgtagctgcagtcggcaaagagaaaatggaagtttctttattacaagttgatcctgaactgaaaaaagaaatttttgacggctactatcaaacaatgaaaacagctgtaatgacaatggataaattggcacgtgaagacgaaatcgaaaaagtcaaagaaacggtcaaagaagtttacgctgaaaaatttgcggatcatgaagatgaagcgcaattaacaaaagaagtaaaacaaatcgcggaagatcttgaaaaagatgtggttcgtgaattgattacaatcgataaaattcgcccagacggacgtaaattagatgaaattcgtccgttggctgctgaaacaggtattttaccacgtgttcatggttcaggcttatttacacggggacaaacgcaagcattatctgcttgtactttggcacccttaggtgaacatcaaatcattgatggtttaggaacagttgaaagtaaacgattcatccatcattacaacttcccgcaattctctgttggttctactggacgtgctggttcaccaggtcgtcgtgaaattggccatggagcattgggtgaacgtgcattagcccaaattattccaagcgaagaagatttcccttacaccatccgtttagtagcggaagtattggaatcaaacggttcttcttctcaagcaagtatctgtgctggtacattggcgttaatggatgctggtgtgccaatcaaagcaccagttgctggtatcgcaatgggcttggtttccgatggtgaaaactatacgatcttgacagatatccaaggattggaagaccatcttggcgatatggactttaaagttgctggtacaaaagatggaatcacagctttgcaaatggatatcaaaatccaaggaattactgaacaaattctttctgaagcattaacgcaagcaaaacaagcgcggatggaaatcttagaagtcctaactgaaacgattgctgagccacgtaaagaattaagcccatacgcaccgaagatcgaaatgatccaaatcgatccagataagatcaaaacagtcatcggtaaaggcggagacacaatcaatggtatcatcgaagaaactggtgtaaaaattgatattgatcaagagggtaacgttagcattgcttcttctgatgcagatatgatcaaaaaagcgattaagatcattgaagagttaactaaggaagtcaaagtcggcgaagtgtacttaggaaaagttgttcgtatcgagaaatttggagcctttgtaaacttgattaaaggcaaagatgcattggttcacatttcacaacttgcaaatgagcgcgtgaataaagtggaagatgtcgtaaaattaggcgatgaagtattagtaaaagtgacagaaatcgatcgtcaaggtcgtgtaaatgcttctcgtaaagccttattgaaggaagaagaaagcaaaaaagcagaaaaataatatgtcattgaggttattctttgacaattctcgctgtaaactggataatactgataagttttaggggagtagcgacatagagtaagctctatgcttttagatcaacaactagtgcgcagcgctggtctaagagataatttgccagacctaaacaatagtgaaaactgttgtttaggtcttttttttgtcagtcgtgctttttgcagtgtaattaagtgatatcagctaaaaaatatttaatagttttcagttgaggtttagtacgaggataagaaactattgtctaagtataagaagaacttgtctattttggtgaagaaacctgaaacttttttaatagagaatcaataccgattcaatgagttgcttaacaggagtgtgcggaatggaaaaaaagaaagatcatgatcatatcaaaaagctttcagcggcgggattgctgattgcgatgggagtcgtgtacggcgatattgggacgagtccgttatatgtgatgaaagctattttagaggaaaatggtggactgagcaccgtaactaaagattttgtactaggtgcagtctcattagttttttggaccgtcatgctgttaactacggtcaaatacgtgttgattgccttgagagcggataaccatggtgaaggaggaatcttctctttatatacattagtacgtaaaggtggaaaatatttaattgttccagctatgattggtggtgccgcgctgttggctgatggcgtattaacacctgcggtaacggtaacgacagcaattgaaggactgcgggggattcctgatttttatcaggagtttgggaacaatcaaaatatcatagtaatcatcacgttagttattttactttttctatttttaattcaacgttttggtacggattttgttgggaaagcttttggaccgatcatgtttttatggttcacctttttagggctgatgggtattttaaatatcccatatgattttagcgtgatcaaagcgttgaatccttattatgcgatccacctattattcaatcctgacaataagatgggaatctttattttaggaagtatcttcctagcaacgacaggtgccgaagccttatattctgacatgggacacgtcggaaagaaaaatatccattttagctggccgtacgttttgctttgcttaatgttaaattatgcaggacaagcagcttggattttgcactcaaagggcaatgcctcgattgaagggatcgaaaatttaaatccatttttccaaattttacctgacgggtggatgatctttggtgtcatctttgcgacgattgctgctatcattgcctctcaggctttgatttctgggtcattcacactagtgtctgaggcgatcaagctgaaactgttgcctagaatgcgaattatttatccaggaaaaagtattggtcagatgtatattccggcgatcaatatgatcttgtgggctgcatgttcattgattgttttgactttccgcacatcaagtcatatggaagcggcttatggtctatcaattacggtaacgatgttaatgacgactttcttgttgtatcattatctattacaaagtggaacctcgcgcattttagctggtttaatgctactcttttttggtatattggaaggcttcttctttatatccagtgtcaccaagttcttccatggaggttttgtggcggtggcaatggcattgctgatattaagtgtgatgtatatttggcatcgcagtaatcaagttcaagaagatgcgagccaagatgtttatttcaaagactatctgccgcaattacaagagcttcatgacgatgacagaattccctattatcaaaccaacgtcgtttttttagtcccacgtttagaaggcgatgcaatcccgcagcaatttatttattcgattttggataaacgattaaaacgggcaaaagtatactggtttgtaaatgtagaagtaacagatgaaccatatacagaagaatatagtattgatatgatgggaactgattttattgtaaaggttaaattgtatctaggttttcgaatcgctcaggatgtaaacgtctatttgcgtcaaattattcatgatttgatgaaacaaggccgtttgcctaaacaaccgcagcattactcgttaactcctggacgtcaggtaggggattttcgttttgtcatgattcaggaagaattatccaatacgactagaatcgacaaatgggatcgtcaagttatgcaagcgcgtttagcaatcaaacgtcatacagttacgcctgaacgctggttcggtattgagtatagtgaggttacttatgaaacagtgccgttaattgtcggcgaaacgaaaaaaacatggctgaaagaacgaaaagaatagtgagtccctagtctaatgtataatttgctcattcgaatcatctatttagaagatttgttcaaaaagtttattcaaataaagagtttttggctgaaatacaagtcaaaaactcttttctttttatttgaaataagttaagttaagattaaaatagaatgaataaaggaggctgagagatggaaatgacaatttcggggttacgagaaaggctgcaagaagccgatgaaaaacaattaagtgaattaatctgtcagatatacaaacattcagaagttgctcaacaaatcgtggattcaactcttttggatgatgattatggaatgcgattcgctgaaaccactaagaaaaaactagaacgggctttttttccacacggtaaaattgatcgttctttgacgcaagctaaagagttgttgcgtcaatttcgtaagagttgccaaaatcagcgagcattgatcgagattgaattgttttttgtcgaatgcggactagatttcctcggcatctttggagaatcagatagagagatgaaagaattgctgattacgaactacgcttcagcggtagcgcggattttagaagatggttcggaactttttttccaccactattttgccaaatgtaaccaaattattgatgttgcaagaggtttcacctcaggattttcacaggatatgctggatgtgtatcaacagttagtaaaaaggtgaggcctaggcctcaccttccatttctagttctagttgcattgctcgttcttgtgcctgttcttggtctaactttctcaagtggcgcattgctttaaagtaggaagtcaacaacacagcagttgatcccatccaagccaatggtgacgcaaaggctgctccagcaaaaccaaaagagtgtgtcagaataatggcagcgaaggaacgcataacaagttccatgatcccggcaatagtcgggatttttgcttgccctaatccttgcagagtatagcggaggatgaacaatattgctaagacccaatacaaggaaccattaataataaaataggtttgtgtcagttgaaatacgtgtacttcgctaggattaacgaaaagagcgacgaaataatgtccgcaggtgatcactaaaacaccaacgaaaatactaaatataccgctcattaccaaacattgcttaacaccaagtaaaattcgtccatattcttttgccccatagttttgagcagtaaaagttgccatagtaattccgaatgacatcattggtaagattgcaagctgatcaattcgacttgcagtagtttgcgcagcaacgacgtctgttcctaacgtattcaatgcagattgcaaaatgacagcaccaattgcaataattgatgattggaatcctataggcaaagctgagttcaagtgtatgcgaaagtcctctttgttaagagaaaaatgtttacgattgatttgtaatatagggatttttcttcggataaaccacacacacatcaaacttgctgcaacttgagcgatgaccgtcgcataacccgcaccagcaactcccatatggaaataaataatgaagattagatctaagacaacgttgattactaccgcaaaggccaagaagaatagcggtgtacgactatctcctaaggcacgtaccatatttgacaaaagattaaatgccattgatgcgaagatcccgcctaaaagaatagagataaaatcttgcgcttgatctagcaattctggcggtgtctgcatgagcaataataagggacgtaagaacagcaggcttaacgtagtcaaaacaactgttacaccaagactaatcaaaatcgaagtagcaaagctttttcgcacgccctgagcatctttagcaccgaaacgctgagccgtaataatagagagaccagaagttaaaccttgtgcaaaaccaataattaaaaaactgacactgctagttgctccaactgcggctaaagcatctttgcctaacgtttgacctactacgatcatatcaaccatactgtaaaattgctgaaaaacatttcctataaacaaaggcaaggcgaataaaatgatcagctttgccggatttcctcgagttaattctttcatctttttcccgctttctaataaaattttctgattgatattaccataaaattttctgaaagcaagtgtcttgaataaaaagttaagaaaaaagagacaacccttaagaaaggttgtctctgaaattaacgttgccggatctcgtgcggcaaaaggatcgtctgacggctgccgtcatcgtaggcataaacttcttgagggaagtcattagaataaccaaatgggagatctattcccatttcgacgctacttccttcttgggagaagtgcatcgtaacacgaccatcattattgatcaggtcaaaacttaagatattgtctaatgggatcaagccctttaagtctaggtcaatgatataccagatactatcaatcagctcgcctggcaagctggataccacaccgacagaggcataacgactttttttagaatcaaatgtttcaaacatagattttcctcctttagttggaatcacttacttaaagtacgagtaagctttgtagtgacttattgtaattcttttttttagaaaaaaccacttattacgcttagtctataagaaaaagtaaaaaattctaaatttttaaaggaaggaaccagacttttgtagtttaaaaaaagatgaccggctagaaaagcgggccatcgcattaaatttttattcttctgttgactcaccaataacttctggttcagcgccttcagcagcttcatcttcttcaggtagttcttgcgcttcttgaacagcaacgatttgttcttctgcatcagttacgattgtgtaatcatcattcttaggtagatcacctacagaaattgattggccgatttctaatccagagatgtctacatcaatgccttctggtaatttttctggtgttgcagaaacagtggctgtgtaaagcgtttgagttaatacaccgccagctttcacgccaacagattcaccaactaagttgatttctgtttcagcttcagtttcttctgacaagtttacagataataattcaatatgcgttaaacgacgagtaaaggtatcaacttgtgagtcgcgtaatagtgtgttcacctttttaccgccaatttcaatggcgaaaacagtattcgcaccattttcacgtaacaattttgaaaattcacgttcatcaattgagataggtgtactttctatcttgtacccattaacgactgcaggaacttttccttcgtgacgtaatttgttgcgaatggaacggggacgagttgctctttcttctactttcaatgatactgccataaccaaattcctccttaaaatgtgactgtctgtggttgttcagacagattttatttaagtgacgggttattctcagcacaatggctttgcgaaaaaacgcaaaaagacagtcgtctacacaactgtccaaaaaaagtctacgttcaactttctctaccaggtcataacgctgtgtatgagaaacctttgattcacttaatcatacgaatctctgactcgtataattaaattctaggacttatctaatcaaaatgcaagtataatgtctgttgacgatttaagtaaggaatttttcgtagttggtaaatactatgttaacggagctaaatgttcaaatgtgtcattagtttttgagagttgttttcttgatagcaatacttttgtttttgaaagtgaataaaaacatcaagaaagagtgtgagggttttgtctctttttgaaattcggtataatgagtccaacaatattgaaggagttttaccatgcgattagacaaagtgattgagcagaacttaaaaacaacacgaaaagaaatgaaacgtttatttctaatgaaaaaggttttaatcgatggtgaagttgagctgaaccagtggcgcaacgtcgatagtcaactccatgagattcaagtagatgggcagaagttgcaaacggatcacgtgtattacttattaaataaaccagccggcgttgtaacagcgaaaagggataataaatttcaaacagctatagaactggtgaaagaaggagagcgtccagcagatttatatccagtaggtcgcttggatcgtgatacgaccgggttgttgttattgactgacaatggtcaactaggttacgatctcttacagccgtatgctaaagttgcaaagacatatcgtgccacaatcaacgatacagtgacatttgaggacgtgttagcttttgaaaaagggattgtttttcgcggaggaattcgttgtcagccagcgcgtttagcgattttacaatctgatccagaccagtcggaagttttacttacgatcaaagaaggaaaatttcatcaagtcaaaaaaatgtttttggcttgtgggaaaaaagttacgagcttgactcgtattgcgatgggaccaatagttttgccagcaaatttagcagtaggtaattaccgttcgttaacattggcagagcttaaacaattaaaatcatattttagatagaaggtttgaagatgggatacgagacaattttatttgatatcgacgatacgttgctggattttaaagcagcagaagaacaagcattaagtcaattgtttcaagatatgggagtggagccttctttatctgtgaagaacaattacaaaaaaatgaaccaaggcttttggcgcgatcatgaagcaggactgctatcacgccaagaattactagacaatcgtttccgcctattttttgaacaatatgaacgagaagttgatgggccaaaaacagaggcgcgttatcgctactatttgaatcaaggacatcagttgatttcaaacagcctagaagttgtagaaagtctgagtcagaaaaaagatctttatgtagtaacaaatggtgtgtctgtaactcagcatcagcgtctagaaaaatcaggacttgcaccttatttcgaaaaattctttatctctgaagaaatgggtgttcataaaccaatgaaagaatttttcgacatcgtttttgcggaaattcctcgattcgacaaagaaaaaaccgtgattatcggtgattctttaacttcagatattaaaggtgggcaggttgctgggatcgacacgatttggatgaatccccatgaaaatgaaacgaaagaaattagaccaacgtttcagataaaaaaattgacggacctctatcagattttagatgatttttaagttttatatagcaatttgacgttgtttcgctataataggactaatgaaaaacgaaagaggttttacttgcatgaaaaacaaaccgatcatcattggtgtaacgggcggttcaggtagtgggaaaacgagtgttagccgtgcgatttacaatcggtttcccgatcattcaattatgatgttggagcacgattcttattacaaagaccaaagcgctatcagctttgaagaacgattaaagacaaattacgatcatccttttgcgtttgatacagatttattgattgaacatttaaaggatttaacaaaatatcaatcggtggaagtgccaatatacgactatgtggcgcatacgcgcagcgctgaggtttatgtacaggagcctaaagaagtcatcatattagaaggaattctgattttagaagatgaacgtttacgtgatttaatggatatcaaaatttatgtagatacagatgatgatattcggattattcgccgaattaaacgtgacatgaacgagcgtggaagaacattggaatcggtgattgatcaatatttgacagtggtgaagccaatgtatcatcagtttatcgaaccaacaaaacgttatgcggatataatcgtgccagaaggcggcgaaaatcacgtagcgatcgatttgattgcaactaaagtagcaagttttttgaatcatgagtaaaaagagcaaagcagaaacttcctgctttgctcttttcacgtatttgttatgcggccgagaagactcgaacttccacggtattgctaccactagcgcctgaagctagcgcgtctgccaattccgccacgaccgcaaggaaattacttatttattttagcacaaaaatttttttgtgccagagataacgtcgataagtctcaaaaaacccgactcgctattgagtcgggagaaaattttataagtagtattttttagcaactgttaagtcgtcgttcaagtcataaacaagtggttgacctgtaggaatttctaagtccatgatatcttcgtcagaaataccttcgatgtgtttagctaatgcacgtaaagagttaccatgtgcagcgactaaaacagttttaccgtctttcaaagcaggagcgatttcgtcttgccagaaaggtaacgcgcgttccaaagtaactttcaagttttcgccaccagggatatcgcgagggtctaacatagagtaacggcgatcttgagctgctgaaccttcgtcagttgcttccattaatggaggtaatacgtcgtatgaacggcgccagatatgaacttgttcgtcaccatacttttcagcggtttcttttttgttcaatccttgtaatttaccataatgacgttcatttaagcgccaagattttacagttggtacccaaagttgatcagattcttcaagaatatagttacaagttttaattgcacgagttaaaacagatgtataagctacatcaaattcaattcctgcttctttgattttacgtccgccttcttttgcttcttcgacaccttctggagccaaatcaacatctgcccagcctgtaaattggttcaacttgttccattcacttaagccgtgacgagaaaaaactaattttggcataacattctctccttttgaaatttctgaaattttcaattcctgattcattgtacaatgtttctgccgtgatttccattaaattgagtgtgttttttatcaaaacacaagctttacaaggattttttattatttctttggaacttccaaagtttttggaccttctggtgtcccgacgattacgcgtgagatcatatcaataaacaatccatgctcaactaccccgacgcacttatccagttctgctgctaaggcgtgaggatcttcgataacctctagatgtagatcaatgatataatgtccgccatctgttgttaaaagttcgttggagtcagtcatccgccatgttggtttatatccctttgattcaaataaacggaagacattgtgactgccaaagggcactacttcgactggtaagggaaagtttcccaatttattgaccattttactttcgtctacgatccagatgcagtctttggaataagttgctactactttttcgaaaagcagtgcagcacctccgcccttgattccttggaaatcatcactgatttcatccgcgccatcaatagtaagatcgactgattctacatcatcgattgcttttaacggaattcctaattctttagcttgttgttctgttttagaagaagtcacgacaccagtgatttttaaaccttcttcatttactcgacgcccaagttccttcactaaatagtaagctgttgacccagttcctaatccaacggtcattccatctttgacaaattttgctgcctcgatcccaactaactctttcaaattcattgaaaatcccaccttctgctaagttatgtccattgtaatcgcaaaaaaagaaaaaagatagccttttcagtaaaaaagaccaaaaaagtggatgcgctttacacagcgttccttcaggggatagggagtataatataaagaataaattttttcttattttgagtcatctcgaaaacaaaaaaatacgatattaaaaagaagaaaaaaactttaagtagtttgttgacagtaaaaatcaatcatggtatgctatcaaaggtgctttgtgaacaggtctctcgatagagacgtgctgactgtgtcgaagtacgcttgatagagaatgcagggatgcattattttttatcgctgaaaaagaaccaccaggatgtgtggtactagaaagcggatcgaggaaggaggaaacaaggaatgcctacaattaatcaattagtacgtaaacctcgtaaatcaaaggtggaaaaatcaaattcaccagcattgaacaaaggatataacagctttaaaaaagctcaaacaaacgtgaactcaccacaaaaacgtggagtttgtacacgtgtggggactatgacacctaagaaacccaactcagcattgcgtaaatatgctcgtgttcgtttgtcaaacttgatcgaagtaacagcttatattccaggtatcggccataacctacaagaacatagtgttgttctattacgtggtggtcgtgtaaaagacttgccaggggtacgttaccatatcgttcgtggcgcactagatactgccggtgttaacgatcgtaaacaaagccgttctaaatacggtactaagaaacctaaagcttaatcaaacgaatagataagacatattttcggaaggaggagttacgtatgactcgtaaaggaacgattgcaaaacgtgatgttttgccagatcctatgtataactctaagctagtaactcgtttaatcaaccgtgtaatggttgacggcaaacgtggtactgcttcaaatatcgtatacaacgcttttagtactattaaagaatcaacaggaaatgatccattggaagtttttgaacaagcaatggaaaacattatgcctgtattagaagttaaagctcgccgtgttgggggttctaactatcaagttcccgttgaagtgcgtccagagcgtcgtactactttaggcttgcgttgggttgtgaatttcgcacgtttacgcggcgaacacacaatggaagaacgcttagcaaaagaaatcatggatgctgctaataatactggtgcttctgtgaaaaaacgcgaagatacacacaaaatggcggaagccaaccgtgcatttgctcattatcgttggtaagattttttctgctgacaaaggtcaacagatttctgaccaaacaacgctaaatttaatttaagagaggagcaaactaagaaatggcaagagaattttctctagaaaacactcgtaatatcggtatcatggctcacgttgacgctggtaaaacaacaacaacagagcgtgttttatactacactggtaaaattcataaaattggagaaacccacgaaggcgcttctcaaatggactggatggaacaagaacaagaacgtggtatcacaatcacatctgccgctactacagcgcaatggaagggtcaccgcgtaaacatcattgataccccaggacacgtggacttcacaatcgaagttcaacgttcattacgtgtacttgacggtgcagtaactgttttggactcacaatcaggtgtagaaccacaaacagagacggtttggcgtcaagcaacagaataccgcgttccacgtatcgtattctgtaacaaaatggacaaaattggtgcggacttcctttactcagtaagcactttacatgatcgtttgcaagcaaatgctcatccaatccaattaccaattggtgcggaagatgatttcactggaattattgacttagtcaaaatgaaagctgaaatctatacaaacgatttaggtacggaaattcaagaaactgaaattcctgctgaatatcaagaacaagctgaagaatggcgtgaaaaattagttgaagcagtcgctgatactgatgaagacctaatgatgaaattcttggaaggtgaagaaatcactgaagaagaattgaaagcaggaattcgtaacgcaactctagcagtagatttctacccagtactatgtggttcagccttcaagaacaaaggtgttcaattgatgttggatgcagttattgactatcttccagcgccaactgatgtacctgcgatcaaaggtttcgatcctaaaacagacgaagaaacggaacgtccagctgatgattctgctccattctcatcacttgcgtttaaagttatgactgacccattcgtaggtcgtttaacattcttccgtgtttactcaggtgttctaaattctggttcatacgtattgaatgcttctaaaggtaaacgtgaacgtatcggacgtattctacaaatgcatgcgaatacgcgtaaagaaatcgaaacagtttactcaggcgatatcgctgcagctgttgggttgaaagacacaacaactggggatacattgtgtgacgaaaaagcgccagttatccttgaatcaatcgaattccctgatccagttatcgaagttgctgttgaacctaaatcaaaagctgaccaagataaaatgggtgttgctttacaaaaacttgctgaagaagatccttcattccgcgttgaaacaaacgttgaaactggcgaaactgtaatcgctggtatgggtgaacttcacttagacgtattggttgaccgcatgcgtcgtgaatttaaagtagatgctaacgtaggtgcgcctcaagtatcttaccgtgaaacattccgttctgctacaaatgcggaaggtaagtttgtacgtcagtctggtggtaaaggtcaatacggtcacgtatggatcgaatttacaccaaacgaagaaggtgccggcttcgaattcgaaaacgcaattgtcggtggtgtggttcctcgtgaatacatcccagctgttgaaaaaggattagaagatgcgatggctaatggtgtattagctggctacccgttagttgatattaaagctaaactttatgatggttcttaccatgatgtcgattcgaatgaaacggccttccgtgtagctgcgtctatggcgctacgtgctgctgcgaagaaagctaatccatcaatccttgaaccgatgatgaaagttacgattactgttccagaagattacttaggtgatgtgatgggtcatgtaactgctcgtcgtggacgtgttgaaggtatggaagcacatggtaactcacaaatcgttaacgctattgtgccgttagctgaaatgtttggttacgctacaacacttcgttcttctacacaaggacgcggaacatttatgatggtctttgaccactatgaagatgtaccgaaatcagttcaagaagaaatcattaagaaaaatggcggtaaagctgaataattcttaaaagtcaattgatttttgacggctttttccaaaagaactgtatttttaacaacgtttcatgtaaaataattaactgatgatatgggctcgcatcgcttttgtgatgcggacctatcagataaaaaactaaactcatttacttaggaggaacattttaaatggctaaagaaaaatttgaccgttcaaaaccccatgttaacattggtactatcggacacgttgaccatggtaaaactactttaacagctgcaattacaactgtacttgctaaacaaggcggagcgcaagctatggattacgctcaaatcgacggagctcctgaagaacgcgaacgcggaatcactatcaacactgctcacgttgagtatgaaactgacaaccgtcactatgctcacgttgactgcccaggacacgcggactacgttaaaaacatgatcactggtgctgctcaaatggacggagctatcttagtagtatctgctgctgatggccctatgcctcaaactcgtgaacacatcttgttatctcgtaacgttggtgttccttacatcgttgtattcttaaacaaaatggatatggttgacgatgaagaattacttgaattagttgaaatggaagttcgtgacttattaactgaatatgacttcccaggcgacgacactccagttatcgcaggttcagctttgaaagctttagaaggcgacgcttcatacgaagaaaaaatcttagaattaatggctgctgttgacgaatatatcccaacaccagttcgtgatactgacaaaccattcatgatgccagtcgaagacgtattctcaatcactggtcgtggtactgttgcaactggtcgtgttgaacgtggacaagttcgcgttggtgacgaagttgaaatcgtaggtatcgctgacgaaactgctaaaacaactgttacaggtgttgaaatgttccgtaaattgttagactacgctgaagcaggcgataacatcggtgctttgttacgtggtgttgcacgtgaagatatccaacgtggacaagtattggctaaaccagcttcaatcactccacatacaaaattctctgcagaagtttacgttctaactaaagaagaaggtggacgtcatactccattcttcactaactaccgtcctcagttctacttccgtacaactgacgtaactggtgtagttgatctaccagaaggtactgaaatggtaatgcctggtgataacgtaactatggaagttgaattaatccacccaatcgcgatcgaagacggaactcgtttctctattcgtgaaggcggacgtacagttggttcaggcgttgtaacttcaatcaaagcttaatcaaccttacaattcaaatttattatgctcggacgtaaaagagtcaccgattatcggtgactcttttttaggattattcattggtcgcgagagggatacattgctgtttttatatagaagaaaacttttattctgtttaaaagattaaactttctgaaaacaaaacagaaaatcctaaaaactttagaaaatccttgcaatcataggtcccatgtaatataatcataaaggtgctgtttgcaggagtgcaaatatcactggggggttctgaaaagaatccgtcggctttgaaacgagaggttgcgacacgcccggacgctttgccacgaacgagcgtgacggagattttcgtggagctatgtctacttttaaaataggcgaaggagggaacaagatggcaaaacaaaaaattcgtatccgtttaaaagcgtatgaacatggtattttagatcaatcagcggataaaatcgtggaaactgcaaagagaactggagctagcgtatctggtccaattccattaccaactgaacgcagtctttacactgtaatccgtgcgactcacaaatacaaagattcacgcgaacaattcgaaatgcgtactcacaaacgtctaattgacattgtgaacccaacaccgaagacagttgatgctttaatgaagcttgacttaccatcaggtgtgaatattgaaatcaaactataattaagaagatggaggtgtaatcatgaccaaaggaatcttagggaaaaaagtgggaatgactcaaatcttcactgaatctggcgaacttattccagttactgttatcgaagctactccaaacattgttttacaagtaaaaacaatggaaaacgatggctacgaagctgttcaattaggttaccaagatatgcgtgaagttttgtctaacaaacctgcgaaaggtcatgttgcaaaagcaaacacggctcctaagcgcttcattcgagaattcaaagatgttgagctaggagactatgaagtaggtaaagaagtgaaagttgatactttccaagctggagacatcattgatgttaccggaacgactaagggtaaaggattccaaggcgttatcaaacgtcacggacaaagccgcggcccaatggcacacggatctcgttaccatcgtcgtcctggatctatgggtcctgttgcaccaaaccgcgtatttaaaaataaaaaacttgctggtcgtatgggtggcaatcgcgtaacgattcaaaatcttgaaattgtacgtgttgacgctgaccgcaatgttatcttagtaaaaggaaatgttcctggagctaaaaaatctttaattactatcaaatcagctgtgaaagctaaataattagttagaggaaaggaggaactaaggaatgccaactgtagcattattcaaacaagatggaacacaaaatggtgacatcactttaaatgaagaaatcttcggaattgaaccaaatgaaagtgttgtttacgatgcaatcgttatgcaacgcgcttcattgagacaaggaacacacgctgtgaaaaatcgtagcgcagttcgtggcggtggtcgcaagccatggcgtcaaaaaggaactggacgtgctcgtcaaggttctatccgttcaccacaatggcgtgggggtggcgttgttttcggacctacaccacgttcatacagctacaaacttcctaaaaaagttcgtcgcttagcaattaaatctgttttatcagaaaaagttgctgaaaataacttggttgctgttgatgctttaagctttgacgcacctaaaacaaaagaattcaaacaagttttaactagcttgtctattgattctaaagtattggttgtattggaaacaggaaacgaagttgcaggcttagctgctcgtaacttagcaaacgtaactgttactacttcagacaacgttactgtattagatgtagtcgctaatgacaaaatcttagcaacgcaaactgctcttactcaaattgaggaggtgcttgcataatgaacttactagacgtaattaaacgcccagtgatcactgaaaaatctatgttagacatggatgaaaagaaatacactttcgaagtggacactcgcgcaaacaaaactttagtcaaacaagcggttgaagctgctttcgacgttaaagttaagaatgtaaacattatgaatgctaaaccaaaagcaaaacgtatgggtaaataccaaggcttcactaaaaaacgtcgcaaagctgttgtgactttaactgaagattcaaaagaaatccaaatttttgacgctgaataagcgttaaaaaatcactagtaaataggagggaaactagacgtggcgattaaaaagtacaaacctacctcaaatggccgtcgtaatatgacaagttctgatttcgctgaaatcactacttcaacgcctgaaaagacgttattacaaccattgaaaaacaacgccggtcgtaacaacaacggtcgcatcactgtacgtcatcaaggtggcggacataaacgtcaatatcgtgttatcgactttaaacgtaataaagataacgtggttgctacagttcaaacgatcgaatacgatccaaaccgctcagcaaacattgcattagttcattattcagacggagtgaaagcatacatcttagcccctaaaggcttagaagttggcatgacaatcgtatctggagcagatgcagatattaaaatcgggaatgcattaccactagaaaatattccagtcggtactgtaatccacaatattgaaatgaaacctggtaaaggcggacaattgatccgttcagctggtacaagtgctcaagtacttggtaaagaaggaaaatacgtattagtacgtttaaactctggcgaagttcgtatgatcttagctacttgccgtgctactatcggttctgttggtaacgaacaacatgaattgattaacatcggtaaagctggacgttctcgttggatgcgtaaacgcccaactgtacgtggtagcgtaatgaaccctaacgatcacccacacggtggtggtgaaggtaaagctccagtcggacgtaaggctccagtatctccatggggacaacctgcattgggttacaaaactcgtaacaagaaagctgcttcagacaagcttattgtacgtcgtcgtaagactaaataaaatcattgactatgtgtcgcatattttgagaggaggtacaccatgggtcgtagtttgaaaaaaggacctttcgctgatgatcatttgatgaagaagatcgaagcacaacaaggtgttgaaaagaaaaaagttattaaaacttggtctcgtcgctcaacaatttttcctaattttgtaggatttactattgctgtttatgacggacgcaaacatgtgccagtttacatccaagaagacatggtaggacataaattaggtgaatttgcaccatcaagaacttatcgtggacatgccgccgacgataagaaaacaagacgttaattttgaggggaggatattaacatggcagaacaaattacatcagctaaggcaactgcgaaaacagttcgcacttctcctcgtaaagcacgtttagtaatcgatcttattagaggaaaaagcgtagcagaagcaatttcaatcttgaaattcacaccaaacaaatctgcaggaatcattgaaaaagtaatgatgtcagcagttgctaacgcagaaaacaactttgacttagatgttgaaaatttggtagtttctgaagcatttgttaacgagggaccaacaatgaaacgtttccgtccacgtgcaaaaggttcagcttcaccaatcaataaacgtacaagtcatattaccgttgtggtatcagaaaaataaggagggataatcagtgggtcaaaaagtaaatcctattggaatgcgtgtaggcatcatccgtgagtgggatgctaaatggtatgctgaaaaagagtatgctgaatttttacacgaagatttgagaatccgtaagttcatcgcaacgaaacttgctgatgccgctgtgtcaactgttgaaatcgaacgcgctgcaaaccgcgtaaacatttcaatccacacagctaaacctggtatggttatcggtaaaggcggatctgaagttgagagcctaagaaaagaattaaataaattaactggtaaacgagttcacatcaacatcgttgaaatcaaaaaaccagatttagatgcaaaattagtcggagaaggaatcgcacgtcaattagaaaaccgtgttgctttccgtcgcgcacaaaaacaagcgatccaacgcactatgcgttcaggcgctaaaggaattaaaactcaagtatctggtcgtttgaatggtgcggatatcgctcgttcagaaggatactctgaaggaacagttcctcttcatacattgcgtgccgatatcgactacgcatgggaagaagcagatacaacatacggaaaactaggagttaaagtgtggatttatcgtggagaaattcttcctacaaagaaaaacactgagaaaggagggaaataatcatgttagtacctaaacgtgtaaaacaccgtcgtgaattccgcggaaaaatgcgtggggaagctaaaggtggtaaagaaatcgcatttggagaatacggcttacaagctgttgattcacattggatcactaaccgccaaatcgaagctgcccgtattgcaatgactcgttacatgaaacgtggtgggaaagtatggattaaaattttccctcacaaatcttatactgccaaagcaattggtgtacgtatgggatctggtaaaggtgctcctgaaggctgggtttcaccagttaaacgcggtaagatcatgtttgaaatcgccggcgttcctgaagaagttgctcgtgaagcattacgtcttgcttctcacaaattaccaatgaagactaagatcgtaaaacgtgaggaaatgggtggtgaatcgaatgaaggttaaagaaatcagagaattaaccactgccgaaatgctagatcaagaaaaacaattaaaagaagaattgttcaatcttagattccaattagcaacaggtcaattagaaaacactgcacgtattaaagaagtacgtaaatcgattgcacgcatcaaaactgtgttgcgtgaacaagctgacaaatagtggaaggaggccatttccagtatgactgaagaaagaaatcaacgtaaggtttatcaaggacgtgtggtatcagacaaaatggacaaaacgatcactgttgtcgttgaaaccaaaaagaaccatccaatctacggtaaacgtatgaaatattctaaaaaatacaaagctcacgatgaaaacaatgaagcaaaaattggcgatatcgtgaaaattatggaaactcgtccattatcagctaccaaacgtttccgtctggttgaaatcgttgaaaaagcagtgattatctaatcacacgagattttcctatatagatgtttcttaaatctgaaaggaggatacacaagtgatccaagcagaaagccgtttaaaaatcgcggacaactcaggcgctcgtgaaattttaactattaaagttcttggcggatctggtcgcaaaactgcaaatatcggtgatgtgattgttgctacggttaaacaagcaacgccaggtggtgttgtcaaaaaaggtgacgttgttaaagccgttatcgttcggactaaatcaggcgctcgtcgtactgacggttcttatatcaaatttgatgaaaatgcagctgttatcattcgtgatgacaagagcccaagaggaacacgtatcttcggacctgtcgctcgtgaactacgcgaaggcaacttcatgaagatcgtttcattggcaccggaagtattataatcgaaagattcaaccaaaggaggtgcgcaacagtaatgttcgttaaaaaaggcgataaagtaaaagttatctctggtaaagacagaaataaagaaggcgtagtattagaagcccttcctaaaaaagacaaagtcgttgttgaaggcgtcaatatcgtaaagaaacataagaaagcctctcaagaagcccctcaaggcggaatcgttgaggtagaagcaccaattcatgcttctaatgtaatggtgatcgacccttcaaatggagaagcgacacgcgttggctacaaagtggttgacggaaagaaagtccgcgtttctaagaaaaccggcgaagctctagataaataattaaacaaggaaggaggatcttatagatgaaccgcctaaaagaaaaatttgtaagtgaaattacaccatctttgatggaaaaatttaactatgattcagttatggaagttcctaaagttgagaaaattgtcatcaacatgggtgttggtgatgcggtatcaaacgcaaaaaacttagacaaagctgttgaagaattagcattgatttctggtcaaaaaccaatcatcactaaagctaaaaaatcaatcgctggtttccgtttacgtgaaggaatgcctatcggtgcgaaagtaacactacgtggagaaagaatgtatgaattcttagataaattagtgtctgtatcacttccacgtgtacgtgacttccacggagtaagcaaaaaatcctttgatggccgtggtaactttactttaggtgtcaaagaacaattgatcttccctgaagtagattatgatttagttgataaagtccgtggtatggatatcgttgtagtaacaactgctaaaacagacgaagaatctcgcgaattattaacacaacttggaatgccattccaaaaataatcaaggaggcgaaaaaattggctaaaaaatcaatgattgctaaaaataaacgcccagctaaacattcaacgcaagaatatactcgctgcgaacgttgcggacgtccacattcagtttatcgtaaatttcatctttgccgtatttgcttccgcgaacttgcctacaaaggtcaaattcccggcgtgaagaaagctagctggtaaaataaactcgcataaaggaggtaaacagttcaatggtcatgacagatccaattgcagattttctaactcgtattcgtaatgccaacatggtaaaacacgacacagtagaagtacctgcttcaaaaatcaaacgtgacatcgccgaaatccttaaacgtgaaggtttcgtacgtgatgttgaatatatcgaagatgacaaacaaggcatgatccgtgttttccttaaatacggtaaaaatgacgaacgtgttatcacgaacttaaaacgtatttctaaaccaggcttgcgtgcttatgtcaaagctgacgaagtaccaaaagtattaaacggtttaggtatcgcaatcatctctacttctgaaggtttagtaactgacaaagaagctagaggtaaaaacgtcggcggcgaagtgctagcttacgtttggtaagatcaaacaatccatgaggaggtgtctttaagtgagccgtattggtaataaagttgtcgttttacctgcaggagttgaagtaactcaaaaaggaaacgaagtaactgttaaaggacctaaaggtgaattaactcgtactttttcttctgatatcaaaatgaacatcgaaggaaacgaagtaacattcactcgtccagatgacagcaaagaaatgaaaacaatccacggaacaactcgtgcaaacttcaataacatggttgttggtgtttcagaagggttccaaaaagcattagaattaatcggggttgggtaccgtgcacaattacaaggatcaaaacttgtattgaacgttggttactcacatccagttgaaatggtagctccagaaggtgttacgatcgaagttccttcaaacactcaaattgttgttaaaggatctaacaaagaagtagtaggcgaattagctgcgaaaatccgcggaactcgtccgccagaaccttataaaggcaaaggtgttcgttatgttggcgaatacgtacgtcgtaaagaaggtaaaactggtaaatagtaggttgaccctacacgcggcttaggccagcttaattaaagaggtgacaattgtgattacaaaaccagataagaataaaacacgccaaaaacgccacatgcgcgttcgcggaaaaatctctggtactgctgagtgcccacgcttgaacgtttttcgttctaacaaaaacatctacgcgcaaatcattgatgacgtagcgggtgtgacgctagcaagtgcctctgccttggataaagaaatttcaggtggaacaaaaactgaacaagcacaagctgttgggaaattagtagcagaacgtgcttcagaaaaaggtattaagaaagtagtctttgaccgtggtggatacctttaccatggccgtgtagcagctttagctgaagcagcacgcgaaaatggactagaattttaggagaaggaggaacaccattcatggtttatatcgatccaaaacatttggaattagaagaccgcgttgtagcgatcaaccgtgttactaaagttgttaaaggtggacgtcgtctacgttttgcagcactagtagttgttggtgacaaaaacggtcacgtaggctttggtactggtaaagctcaagaagtacctgaagcaattcgtaaagcaatcgaagacgctaagaaaaacctagtcgaagtaccaatggtaggaactacacttcctcacgaagttattggtgtattcggcggcggacgtatcttaatgaaaccagccgttgaaggttctggagttgccgctggtggaccagttcgtgccgtcttggaattagctggggttgccgatgtaacttctaaatctttaggttcaaatacaccgatcaacgttgttcgtgcaactgttgaaggcttaactcaattgaaaaaagcagaagaagtagcgcaattacgcggcatctctgttgaaaacttagctaattaaggaggacgaatgaaatggctgaattaaaaattactttaaaacgcagtattatcggacgtcctcaaaaccaacgtgacactgttaaagcgttgggtcttaaaaaaatgaatagcacagttgttaaaccagccaatgatgcaatcaaaggtatggttaatacagtgtctcatttagtggacgtagaagaagtttaataagacaatgatgattaaaatctaaggaggtgccaatataatgaaacttcatgaattacaacctgccgaaggttcacgtaaagttcgcaaccgcgttggacgtggtacttcatcaggtaacggaaaaacatctggacgtggtcaaaaaggtcaaaaggctcgttcaggcggtggtgtacgtttaggttttgaaggtggacaaactcctttattccgtcgtttaccaaaacgcggatttactaacgtgaatcgtaaagaatacgctgtaatcaatctagatgtcttaaatcgttttgaagatggaactgaagtaacacctgttgctctagttgaagctggaatcgtgaaaaacgaaaaagctggaatcaaagttttaggaaacggatcattagataaaaaactaaccgttaaagcagcaaaattctctaaacatgctcaagaaacaattgaagctgctggtggttcaatcgaggtgatttaatgttcaaacttttaaaggattcattcaaagttcagaacatccgatcacggatcttgtttactgtcttaatgctgttagtattccggcttggtgcacaaatcactgtgccgggagttgatgcgcatggactgcaaggcctgagtgagatgccatttttcagaatgttgaatatggttagtggctcagctatgcaaaacttctctatcttctcgatgggggtttctccatatattactgcttcaatcgttattcagttgttgcagatggatatcattcctaaatttgttgaatggtcaaaacaaggggaagtgggacgtaaaaagctaaatcaagcaactcgctatttaactttagtcttggctttcatccagtctgtaagtatcacagctggatttgactattttgcgcaatttggttttgttccaaaccgtaatgttcagacgtttgttacaatcggcgtaatccttactgctggtacaatgtttgttacatggttgggggaacagatcactgaaaagggaatcggtaacggtgtatcaatgattatctttgcggggatcatttcgcgattgccacaaagcatcaaagatatctatgatgattatttcgtgaacatcgattctagtgatctttggaaatctgttatttttgttgtgattttacttatcgctatcgtgttgattgtcgtttttgtaacgtactttcaacaagcggaaagaaaaattccgattcaatatacaaaacaagtcgttggggcaccaacaagcagttatttaccgctaaaagtaaatgctgccggagttattccggttatcttcgccagctcatttattgcgactccaaatgcggtgttgcaggcattagctagcaagtatagcgcggaaggctggtacgatatgttaacgaagctattcagttatgataccgttccgggtgctgcgatttatactgttctgattgttgccttcacctttttctatgcgtttgttcaggttaatcctgaaaaattagcagagaacttacaaaaacaaggaagttacattcctcgtgtgagaccaggtaaaggaacagaagaatatgtttctgcaattttaatgcgtttaagcgtagtcggagctattttcttaggtttgattgccttgattccaattatcgcacaaatgatttggaatttacctcaatcaattggtttaggtggaacaagtcttttgatcgtcgttggtgtggcgttagaaactgcaaaacaattagaaggactcatgttgaaacgacggtatgtcggattcatggatgaagagtagattcgtgtgttgagggtcatcctcaacgccgttctcgcttcaaatatttaggagggaaatcaatgaacctgatcttaatgggactgccaggcgcaggaaaaggaacacaagcagaaagaattgttgcaacgtacaatattccgcatatcagcacgggggatatgttccgagaagcaatcaaaaacgagacaacactcggattgaaagcaaaatcatatatggatgcaggggatttggtcccagatgaagttactaacggtatcgtgaaggagcgtttagcgcaaaaggacactgataaagggttcttgttagacggattccctcgtactttagatcaagccaaagcattagctgaaatgttaacggacttgaataaaaagattgatgctgtgattgaaattcaagtagcagaagaagtgttagttgaacgtttggcaggacgcttcatgtgccgcaactgtggtgcgacttatcataaaatcttcaatcctacaaaagtagaaggtacttgtgatcgctgtggtggtcatgaattttatcaacgtgaagatgataagccagaaacagttaaaaatcgtttgtctgtaaatgttaaaaacagcgaaccaattttagcttactataatgaagaaggtctgttatatccagttgatggagatcgtgaaattgatgccgtatttgcggatgtagaaaagattatcgaaaaataattttgcctgccgacttgagatgcagtttatcttgccaagttcgatgttttatgatagaatttgtcagtccgacttctagcttttttaagaagtttaactttagaattacggtgggaactgcagtttccgccattttatcgtgtgaaaatgcgaaacaactacaaggaggtactctgcgtggcaaaagaagatatgattgaaatcgaaggaacagtcgtcgaaactttgccgaatgcaatgtttaaagtcgaattggaaaacggacacgaagttcttgcacacgtatctggtaaaatccggatgtattatattcgaatcttacctggagataaggttacagtagaactttctccatatgatttgagccgtggtcgcattacctatcgctttaagtaagttgtactccgtaaaacttcaggaggtataatcatgaaagtaagaccatcagtaaaaccaatgtgtgaacattgtaaagtaattcgtcgtaatggacgcgttatggtgatttgcccagcaaacccaaaacataaacaacgtcaaggataattggaggtgtaattaagtatggctcgtattgcaggagtagatattcctcgtgataaacgcgtggtaatttcacttacttatatttacggtattggaaatactacagcgaaacaaattttagccaacgcaggcgtttctgaagatgttcgtgtacgtgacttaacgaatgaacaaacagacgctatccgtgctgaagttgataaattaaaagttgaaggcgatcttcgtcgtgaaactaacttaaacatcaaacgtttgatggaaatcggttcataccgtggaattcgtcatcgtcgtggcttgcctacacgtggacaaaacactaagaacaacgctcgtactcgtaaaggcccagctcgcgctattgccggcaagaaaaaataattagtgaaggaggtataaatcttcatggtagcaaagaaagtcaatcgtaaacgtcgtgtgaagaagaatatcgaaacaggtattgctcatattcattcgactttcaataatacaatcgtcatgatcactgatgctagcggtaacgctgtagcatggtcatctgcaggttcattaggtttcaaaggtagtaagaaatcaactcctttcgctgctcaaatggctgctgaaactgcaacaaaagctgcaatggaacatggattgaaaagtgttgaagtcactgttaaaggacctggttctggtcgtgaagcagcgattcgttcattgcaagcaactggtttagaagtaactgcaattcgtgacgtgactccagtacctcataatggatgccgccctccaaaacgccgtcgtgtttaatgagtgcccaactctatgagttttacaggaacgtcattgaacaagacacttttcgttttgaaaggggtaaaagacaagaatgattgaattcgaaaaaccaagaatcacaaaaattgatgaagacagagattatggcaagttcgttgttgaacctttggaaagaggttatggaactactttaggtaattctctacgtcgtattctactttcttctttaccaggcgctgccattaccaatattcaaattgatggggtgttacacgaattttcaaccatcaaaggtgtaagagaagacgttgtacaaatcatcttgaatatcaaaggtttagcgttgaaattatttgcggaagaagaaaaaacccttgagatcgatattactggaccagctacggtaactgccggcgatattatcgttgacagcgacgttgaaatcttgaataaagatatgtacatttgtactgttgctgaaggtgcgacattccatgctcgcctaacagtaaaacctggtcgaggctatgttcaagcagacgaaaataaaaaggaagatatgccaattggtgtccttccagtcgattctatctatacaccggtacgtaaagtcaactatcaagttgaaaatacacgtgttggtcgtcgtgatgacttcgataaattaacgatggaaatttggactgacggatcgatcattgctcaagaagcattgagtcttgcagcgaaaattttaactgaacatttagatatttttgtaaatcttactgatgaagcgaaaaatgctgaaatcatggtagaaaaagaagaaacacaaaaagaaaaaatgttggaaatgaccatcgaagaactagacctgtctgtacgttcgtacaattgcttgaaacgtgccggaattaatacggttcaagaattaacgaataaatctgaacctgaaatgatcaaagtacgtaatttaggacgtaaatcacttgaagaagtgaaagctaagttacatgatcttggtttaggactacgtaaagacgattaatattgttgacaaaggagggaaacctacgtgagttatcgtaaattaggacgcacatctagccaacgtaaggcaatgttgcgtgacttaacaactgacttaattatcaacgaacgcatcgttacgactgaagctcgtgcgaaagaagttcgttcaactgctgaaaagatgattactttaggaaaacgcggggatcttcatgcacgtcgccaagctgcaagctttgtacgtaatgaagtcgctgatgttcgcgaagaaaacgaagaaatcgttactgaaactgcattgcaaaaattatttaacgatattgctcctcgttacgctgaacgtcaaggtggatacactcgtatcttgaaaactgaacctcgtcgcggcgacaacgcccctatggttgttttagaacttgtataataatcactcttcactttatagatgattcttttagagtgttatgatgttggagattttctccgagtctagctcagcgccgcttcccagaatgtctgggaagctggcactcatcataaagtgtttttttatacccaaaaacactgtcaagacagatcggtatacaaaagcattttattgagtatcaaggattgataaagtgaagcttttttgctagtcttagtacatatttgcaatgaagcggaaaggtgtaaccatgaagccaattattgaaatcaatcaaattgaatttagttatcaagaagaagcaactcctgctttaaaggatattagcttttcgattaataaaggcgagtgggtcgcgattgttggacacaacggatcagggaaatcaacattagccaaagcaatcaacggtctgcatttgcctcaaaaaggaacggttactgtcggaggaatgacattatctgaggagtctgtttgggatgttcgtcgaatggtcgggatggtttttcaaaatccggacaatcaatttgttggagcgacggtcgaggatgatgtagcattcggattggaaaatcagggaatcgaacgaagtgaaatgcagcgacgtgttcaagatgcattggaaaaagtaaaaatgcaagagtttgcaacgcgtgagcctgcccgcctttctggtggtcagaagcaacgcgtggcaatcgcaggagtagtagctttgcgccctgacatcattattttggatgaagcaacaagcatgttagatcctgaaggtcgagatgatgttattgcaacaattcgtaagattaaagaagaaagtgatttgactgttatctctatcacacatgatattgatgaagcagctagtgccaatcgcatcctagtgatgagagacggggaactgtatcaagaaggaactccagatgaaattttttctgctggaccggaattagtttcgttgggcctagatttaccatttcctgagaagttaaaatcagcattaaaggatcgcggtgtaaatgtacctgcgaactatttggatgaagaagggatgatggactggttatggacatccgttttgaaaaagtaagctacgtttatcaaccgaatactccctttgaacaacgggcgctttatgatattgatttgaatattaaagaaggttcttacacagcattggtagggcatactggtagtgggaaatcgaccttgttacaacacttgaatgcattattgaagccaactgacggtcaagttatgattggggaacgaacgattacaccaacgacagataataagaatttaaaacctgtacgaaaaaaggtgggaattgtttttcagtttccagaagctcaactttttgaagaaactgtagcaaaggacattgcttttggaccgaagaatttcggtgttagtgaggaagaagcattggcattagcagaagaaaacttaaaattagttggactagatgaagaatatcttgaacgctcaccatttgagctttctggcggtcaaatgcgccgtgtagcgattgctggtgttctggctatggagcctgaggttttggtcttagacgagccgacagcgggtttagatccactaggccgtaaagagatgatggaaatgttttggcgtcttcataaggaaaaaaacataacgatcgtcctagttacacatttaatggatgacgtcgcgaattttgctgattatgtttatgttttagaaaaaggacatgtggcaaaacatggtgatccgcaaacggtatttgaagatgttgcctggttaaaggaaaagcaattaggtgtaccgcaagcaactgcttttgctgaaaaaatgcaggctcgcggcgtgaattttgaagcgttacctttaactgaaaatgagttggcagactggatcgtaaaatttgcgggaggtcctgctcatgatgaataaattgatttttggtcgttatattccaggtgattctctgattcaccgtctggatccacgagcaaaattgatcgcaagtttttattttatcggaattatttttttggcgaataattggcaaagctatctatttctaggagcttttacgatgttcgcagtattcctatctaaaattaatttgaacttctttttgaagggtgttagaccactaatttggttaattatttttacagtcgcgttgcagatgctgtttacgcgaggcggaaccttgtattggtcgtggggcgtctttagtctttcttcttatggaatccaaaacgggctatttatcttttgccgatttgttctaatcatttttatgtcgacgttgctaacattaacaacgccgccgctatcaatgtctgatgcgattgaatcattgttaaatcctttaaaaagatttcatttgccagtacatgagatcgccttgatgttgtcgatcgctttgcggtttgtaccgacattaatggatgaaacggaaaagatcatgaatgctcagcgtgctcgtggtgttgatttcagtgatggaaatttgattcagaaagtcaaagcaatagtaccgttattgattcctttatttgtcagcagcttcaatcgtgcggaagatttggcaactgcgatggaagctcgcggatatcgcggcggtgaaggtcgaagcaagtatcgtaaattaaagtgggcatcacgagatacaatcgttctcgttgtttttgctattgcaacagtcattttaatctttttacgcagttaagcttggagtgatccaggctttttttgagcttttggtaattttaacttgttggttcgatggtcgtttctttatggtaggatgaatgaaggagtaagcaattggaggagaaaaaatgactgaagaacgtccaaaactgcaaattggattgaagccagaaatatttcgagaatattattatttgaaagcagaactacaagctttctgtcaggaacatggattatctaaatcaggaagtaaagcagaactaaatgaacggatcgaatattttttgcgaacgggtgaacaattagcaaggccagtgaaggaaaaacggtcgggtcgtacagaggaattaacgctggaaagtttgattgaagagaatattattttttcagaagttcatcgcgctttttttaaaagagaacttggaaattcttttacttttaaggttgcttttcaaaaatggctgaaggcaaatactggaaaaacataccgcgaagcgattgcgatctatcctgaaatcgtagcgaaaaaaccacaaaaaattgatgcacaatttgaatacaatacctatattcgtgatttttttgcagacaatcaaggtcgctctttgcaagaggcgattgtttgttggaagtataaaaagtcactctcgggcagtaacaactatcattcagaggatttaagtgcgttggatttcgaataaaaagctgttataatgactccggcagaaattagttgaggagatggatcatagttctaaccttaacaattgggttcattaataggaaataggagaatagcatggtcagatataaagcagtgattgcttatgatggtacaaattttaatgggtttcaacgacagccgaatgggcgaacggtacaggaggaagtcgaaaagacgttacaaaaaatgaacaatggacagccagtgacgatttttggatctggacgaacagatgctggagtccatgcaatcggacaagtgattcattttgattatccgcaggaacgaccgttggagcggatgcggttcgcattagatacccagacgcctgaagatatcgcggtttcttcagtagaaattgcagcggacgattttcatgcgcggtatcatgtcgtcgagaagacgtatcatttcaaagttcaaatagctaagccgcgaagtccctttcgccgttattatgcggcctattacccttatccattagacttagatttgattcgtcgggcattgccagatttactaggtacgcatgatttcacctctttttgtgcgacaggtggttcgatcgaggataaggtccggacgatttatcaagcggatttggttgtgaatgaggatgagacggaattgacctttatttttagagggaatggttttctgtataagatgattcggatattagtcggaaccctacttaaaattgggaatgggcgtatcccggcggagagtattccagcgatcattgaagcaaaggatcgtaatgccgctggaccaaccgctcatccagaaggcttgtatttagccgaagtaaaatatgaatagcaaaaaagcatccaataacaatcacaagtgattgttgctggatgcttttttaggcttttacttcagcggcgagttgggtcaacttatgaacgtctagaataagataccccttttttatttttttcaggtagccatcctccacaaactgtgcaatcacgaaaaggagatgacgataagaaacacctaaatattcggcgacttgagtgtgtttctcacggtaagtcccttcgttttgtgttaaaagaataaaggccgctaaacgttgtgaaagcggaaagccctgattttgagttgaagctttgatgtttcgataatttttatgagcaaagtagatgcagagcttttggagaaagagcgcatcctctagtaatcgtttctgacagtcttttctcgataaggctaagcaccaacagtcctcgattgcttggacactaaaggcagtttggttttcatcaacgagctccatctcaccgataaaacaaggtggggaaaagaaatcaatcagagcgactttcccattggctaaggtgtcgtataatttggctttgcccttcactaagtagaataaatgcgtaggctggtgattttccttgacaatgtagctgttggccggaaagaaaaataattgcgtatctaaactgacatcgaaggaaaactgatcaaggtagtcagatgatcgaatgaattgctgttttaatttttcgttttgcaacttcttcattttttctacctccttatgtgagaattctcatacttatcataagcaggaacttactataatgcaaatagataaaggaaattaattttttaggaggctataaaatggagaaacggaaaattattttagattgcgatccgggacatgatgatgcgattacgatgttaatggcagcggcacatccgaaaattgatttgttagggatcactattgtagcaggaaatcaaacgctagacaaaacagtggtgaatggattgaatgtctgtcaattgctgggcattgatgcgaaagtctatgcaggaatgccaaaaccgatggtgcgggaacaagtagtagctgataacgttcacggggaatctggtttggacggtccagtttttggtccattacatcggcaagtagaagaaacacatgcggttaaatatatcattgatacgttgttggcgagcgacggggatatcacacttgttccggttggtccgttaaccaatattgcagtggcgatgcgaatggagccattgatcattccaaaaatcaaagaaattgttttgatgggcggtgcttatggaacagggaacttcacaccatctgctgaatttaacatttttgccgatccagaggcagcccatgtcgtctttagttcgggcgcaccgattgttatgatggggcttgatctaacgcatcaaacaatttgtacagaagatattatcgaacgtatggaaggcgttgggaatgtcgcagggaaactatttggtgacattatgcgcttcacgttgaaaagccagtttgaatgcttcgggttagctgcgggtcctctgcatgatgctacatgtgtgggttatctaatttctcctgagatatttgaaacacaggaaatgtatgtcgaaatcgatatcaatcgtggaccttgctatggtcggaccgtttgtgatgagctttatgtgctaggtcagccgtcgaacgccaaagtaggtaagaagatcaatgcggagcatttttgggatttggttgaagagtgtatccgaatgtattcagatgtctatgcagaagcaaaatagatagatgaaatcagagagaaacaacttatttaaaaattgagatcggttgtttctctttgaaaatttgtaaacggtttaaaagcgagatgtgtgaatgaatacaaacgaggagtgagtttaaatgaaagtcgttgttgttggaagcattaatttggatttagttgttcaagcagaccgttttcctaagattggcgagacgatgtttggcaccgatagtaaaatgctgccaggaggaaagggtgctaatcaagcggttgctgcggcacgattgggtgcagatgtgacgatgattggttgtgtcggtgaagatgcttatggtgagattgtcttaaaaaattttcaagagaatatggtcgatacgtcatgcattaaaaaggttgctgaaccaacgggcgttgcctacatcaccatcgcagaaaatgataattcgatcattctcgtgcaaggggcgaacgcgtgtgttgatcgttcattgattgataagtatcaggcacaaattttagctgccgatattgtgatcacgcaatgtgagattccaatcgaagcgatcagatacctaattgatttttgtgcggaaaatgacgtgcgtttgatattaaacccagcgccaactccagaaatcgcgcctgaatatttagctaaagtaacatttttaacaccgaatgagattgaaatcaatcaattgtttcagcaggatgctcagactgttttgcgggagcatcccaatcagatcattatgacgtatggtgcgaaaggtgttcgatatcatgacggagaaaaattaatggaggtcccaagctataaggtgcccgtgtttgatacgactggagctggagatacttttaatgcggcatttgcagtggcgtatgccaaggatcaagaattggagaaggcgatcacatttgctaatcttgctgccagtaagacggttcaagggctaggagcgcaaagtgcgatgccaagaatcgaagagctagtttaacgataaaagtgcgcaataaagtaagcgctaacagaaataggaggatttcaaaatgaaaaacacaaaacttttttctttaggtgttgttgcaatggcagctttaatgacgatcagcgggtgcggtggtggaaataagagcagtgcaacaggcaaagaggatagcgatcatagtgttgtgatggttacggatgtcagcggggtagatgataaatccttcaaccaatctgcttgggaaggattgcagaagtggggaaaagagcagaagttcaaacgcgggatcggcgggtatgactatattcaatccaatgagatcgcccagttcgcctctaacattgacacggctgtatcgaatggcttcaaaacggtcttcgggatcgggtaccttttagcggattcgatcgaagcagcggcgggacaaaatcccgaaacgaattttgtcattattgatacggtgatcgaaggaaaggataatgtcgtttcggcgacctttagagataacgaagtcggctatctcgctggtgtctcagctgcttatacgaccaaaaccaataaggttggatttattggcggagaagagggcaaagtcattgatcgttatgaagctggatttaccaaaggtgtaaaggatactgcgaagaaattaaataaggatatttccgttgacgtgaaatatgcggcctccttcggcgatccagccaaggggaaagccttagcagcgaatatttatcaaaatggagcagacattatttatcaagctgctggcggtaccggtgcaggggtgttttcagaagcaaaagcgttgaatcaggataaaaacgaagcagacaaagtttgggtgcttggcgtggatcgtgatcaacaagaagaaggcggctataaatcaaaagatgggaaggaaagtaatttctgtttagcttcaaccatcaaatcggttggcgtggtcgtgcaggatatttcaactcgagcgctggaggataaatttccaggcggaaaacacttatcctttgggttgaaagatggcggcgtggagatgacagacggctatttgagtgatgaagccaaggcggcagtaaaagatgccaaggaacaaattattgctggtgatgtaaaggttccggaaacaccggaagattagactgatcgtgcccgctgatcttggcgggcactctttgaacaggagaggtgtgaattaaaaatgacagaagagcaatatgtcattgagatgcggaatatcaccaagcaatttggtgatttcaaagcgaatgacgagatcaatctgaaaattcgtaaaggcgagatccatgctttattaggagaaaatggtgcaggtaaatcaacgctgatgaacgtgttgtcagggttattgcagccgacttccggcgagatatacatggatggccaagcagtcaaaatcacgagtcctactagagcgaaccagctgggaatcggaatggtccatcagcattttatgctggtcgatgcgtttacggttacggaaaatattattttaggtagtgaaatcagcgctaacggtatgctggatacgcaaaaagccaaggaagaaatcactcgtttgtccaatgattatggcttgcaggtcgatccagatgcgtatatccgagatatatccgtcgggatgcagcaacgggtagagattttgaaaacgttgtatcgcggtgcaaatgttttgatctttgatgaaccaacagccgtcttaacaccgcaggaaattgacgagctgatcgaaatcatggcgacattagtcaaagaaggaaaatcgatcattttgattactcataaactggatgagatcaaaaaggtagcggatcgttgttcagttattcgaaggggacgctacatcggaaccgttgatgtggaggatgttagttcgcaggagttggcggatatgatggttggccgttccgtttcttttaaaacagacaaacaggcggcaaagatcggcgatgttgttctgtcgatcaaagatctagttgtgaaagaaagccgcggacttgaagcggtcaaaaatttaagcttagaggtacatcgtggggaagtgttagggatcgccggtattgatggcaacggacaatcagaattgatccaagcattgactggattgcgtaagatcgaaagcggcactatcaccattaatggtaaagatgccacgaataataagccaagagaaatcaccgagataggtgttggacacgtgccggaggatcggcacaaatacggtttggttctacccttgcctttgtccgaaaatattacgttgcaaacttattatcaagagccgtttagtaaaaagggtattttaaattttactgaaattcaacaatacgctaagcgtttgatcgaagaatacgatgtacggacgacaagcgaacaggcaccagcagcttctctatctggcgggaatcagcaaaaagcgatcatcgcccgggaagttgatcgtgatccagaactattgattgtcgcacagccaacacgcggtctggatgtcggggcaatcgaatatattcataagcgtttagtagagcagcgagataaaaataagggtgttctgctggtgagctttgagttagatgaaattctaaatgtttctgatcgtattgccgttatccatgcaggtgagatcgtcgggatcgttgatccaaaggaaacatcggaaaatgaattgggtctattgatggctggctatagcttggatgacgcgcgaaaagagttagtaaaggttggtgaaacaaatgaatgatcgttcagcacagatcaaaaatgctttggttccgattatttcagtgattctaggctttttgcttggcggactattgatgttagtaacaggatataacccgatcatggggtatcaagcgatgttccgctcggcgtttcaaagcagtatctcagtcggtgaaatattagttggtgcggggcctttgatttttacagctttaggcttttcggtagcaaattccgcggggttctttaacgttgggctatctgggcaagctttgtgcggctgggtagcaagtatttgggtcgcgctgagcatgccgacagcgccaaaattagtcgttgtaccattagcaattattgcaggagcgttggcgggagctatagcggcggcgatcccaggactgctacgggcctatttcggaacgagcgaagtaatcgtcaccatcatgatgaattatgtattgttgtatacggccaatcatctggtgaacaatgtcatgtcaccggatatcatctccaataagggcgtgacgaaaatcgtaggaaccaacggcttgttgcgagaaccgtggttgaccaatctttttggcgggtcgcgggtcaatctgggatttgttttggctctgatttttttaggcttggtttggtttttgatgaaacgaacgactttaggatttgagatccgatctgtcgggatcaatccattcgcttctgaatatgcaggaatgagcagcaagcgtacgatcgtgatctcgatgattatttctggactgctagcaggtttagggggtgtggttcaagggttaggcacttttgggaattattttgttcagggttcttctatcagtattggatttgatggtatggcagtctcgttattaggaaatggcggttcagtcgggattcttttgtcggccttgttattcagtattttgaagcttggtggacagggaatgcagtttgctggtgttcctagtgaactggcaaatagtgtcattccgctaatcattttcttcgtgggaatcaattatgtggttcgcgttgctttgacaaaagttcgcgtggcaaaaaaagcagaagaaaagagcgaggaggtaaaaatgcagacactaaagcaagaaggagttgatttggaatgaacattcaattgttaggctcgctgatttcccaaacactcgtttattctgccccattgattttgacggcactaggtggtgtgttctcagaacgcagcggtattgtcaatgtcgggctagaaggaatcatggtgaccggagcgtttagttcagttatttttaatttaagttttgcgaaccactttggagcatttactccttggttaggggtattagttggaggaatcatcggattattattttcattgttgcatgctgtggcgacgataaattttcgagcggatcatgtaattagcggaaccgtgatgaatctattagctcctccattgacgatttttcttatcaaggtaatgtatggaaaagggcaaaccgatacgatccaagagcagtttggttatttcgattttcctggattaagtaagattccgattattggtgatttattcttcagtaagaccagcttgcctgcttattttgcgattgttgtcgctttagctgcttggttcattatttataagacaaaatccggactgcgtttacgttcagtcggagagaatccgcaggcagccgatacgctaggaatcaacgtttatgcgatgcgttatgcaggagtaatgatttcaggttttcttggcggcgtgggtggtgctgtatttgctcaatcaatcgcaggccgtttcgcgataacgacgatcgcaggacaaggatttatttcactggcagcgatgatctttggaaaatggaatctgctaggggctatgggtgcagcgatgttctttggctttgcacaaaatttgagtattgctggagccaatctaccggttatttcgcaggttccagatgtttatttacaatcggctccttatgtattaacaatccttgtattagtgctcttcttaggtaaagctaccgggccaaaagcagggggagtcaactatatcaaatcaaaataatttgtataaaaaacaggaggctcatgttgagcctcctgttttgcttattgacgttgatcttttttcgatttcaacattcgcagataaagaacgaatatcccgatcgctactatgaaggaaacagcaccggcaataaagccttttggcatataactgaaagttactttgtgtttgccctttggtacatggatactgacaaaagcgttttggaaggcttttgtctcgacttttttaccatcgatcttggcagaccagccttcatcatatggaatagtcgtgatcaatgtttgggctttattgctgtttacagttccttcagcactgtgtttgccgactttcatgtctacaccgttatctttaatcttgtctactgctagtcgataagcgactgtatccaaagctaaaacttgtggattctggaagctaatggattttgttccatagaagctggcagtaaaggtaatcatcgttgcttgttggtaatagcctaaatcataatattgtccgctgatcccaatttgcgcttgccgcgtttggccgttagcggtgacggtcgctgttgagctttctaattcagcgaaatcataaggatagagactcagataagcttgtgtatttgcaggaacttgaaccttccaagtaacgtcttttgccacgtttccttgtttttcggtaattgttgtaatattccccgcgttagtgacgttagcattttttgtgtctatttgcgtaatcggtaaaaactggaagtactgaaactgttcttgcgataaagcgttaaataattgtgtttgcgtacctagattatcatttggtgaagcctgtagtttatcgatgctctgcggtgcagtgaaggctaatggcaaggcataattattctcgaaaagattatactcgctgacgctatttttcttagtaaaaccatatttattcaagtttttcgttttggcaatattgtatttaattccagtaaaggcatccgctaataacgtattgttttgataacggatattcagactggttcctcgcgagcggaagcccaactgatccatataaccagaagaatgtcggttacggatcgaagagaacatgctgataccgctataaccgtaattaaatgcatcattagaagaaacaggatctagattttccatccgataaaagctgtcattgtcatttttcgtttcgtcgactaaagccttgatggatggatatggctccgtataaaggctgcgtgacgcataattccaatcctttaaaatgccttgtgtcataaagctactattaataaatgcctctgaagacatcaacagcagtaatagtatacttagcgcttttaatggaatcttgttgtaatgatgtgcggtaaaaatcagcgcatagacagccaagaaaccaagtgtgatatataaggaactatttttgagataatcgtagtcttttcccttcataccccaaaaaatcgcaaagagagcgatcagcatcagacaggcagcgactaattgcaaaatattttctcgatctagtttctcccatccccatgcagctaatgtaatcactaaaaatgagagcaggtaggcataacggaataggaacatatttggcgcatgcatcccgtgccagaataaattcattggctggatataaaagcttgcgatcaagattgcggctactgctccataagcaagtttatttttccaaggtatttttttgcagataaagaaaaatagacagaaagctaatggcaaaagtccaatataaataaaaggaatcgaaccatatttcgtcgtatcatacgatccaacgaaatttttagcaataaaatcccaccagcttgtcgcttctgttttaaaggtcgtgatctgtgtcaattcctcaccgttagcacgaaggtctagaattgacggtaaaatcatgatcatagatgcaaagccagctaatagtgaagtgaagccgtagggaataatactttttttgtagcttttccaattggtaatcaaacgggcgatgaaatagaggaccgagaagaccccaatcataaagcccatataaaaactggtcaaaaacagcattaaataggaaacaaataggacggtcggttttttctgatccatcacgcgattgatacccaagatgatcagaggcagataaacaaacgcatccagccacataataatttctgaatgggcaatagcaaaagacatcaatgcataagtagtgcttaaagccacgcgtgaccaattaggcagcttgaagctacttttcgcataaaaccaaaaagctaatcctgctgccccgatttttaacagcgtaagaaaatacaacgcatcgggcatcagctgattaggaaagaaaattactaacggagtaaaaaaaccaccgagataataggaaaccagtgataaataatttaaccccatagaagcattccaggtatataaaaagccttgcttacctaaaagcatattgcgaaaacttgcgtggaaattcgaaaactgtgaaaaggcatcactggctaaaatactacgacttgatccgggataaataccgatcgtcaagtaaacaatcaccataattaaaaatggcaggaaaaagctggccagtaaataccaacggttttctttaaggtagttcttcatataaaaatcaccaaacttctttcaacagactattcaaattttaccatataagtgccgaaaataatgtgaaagaggtgtgaagccaaagctaagaatttaaaaatgagcttgctctattataaataagcaagcaaaaaagagccgaatcgatcggctctttgaattaataaattatctacaaaatagtaatgttaaaacacttagggttctacaaatacttaaaaccatgctgaaattgaaagctagttcacatctttctgatgatctaaaaaacagtctgaaactataaagtaagcgaagacagaactttgctttctgtgaaaaatagaagaaacaaaaaaaccgttcgtaactgaacggtttgatattgtttgattggataatattaaacgcgctcaacttttccagatttcaaagcacgagttgagacccaaacttttttaggttttccgtccactaaaacgcgaactttttgtaaattaggttttacagtacgtttcgtagcgttcatagcgtgagaacggttatttgcacttcttgttttacgaccagtaaaatagcaaacttttgccatgtgtagtttcctcctttagccttgatattggagcgcttctttggctcatactaaaataaaatagcacaaattgacaagattggcaagtgaatttttttagaaagattgacattctaaggatttgcaggtaaattatactctgttagcgtaaaaatttttaacaaaagttttgatgcaagaaagttagcagaaatctgcgtcaacgcagggagcgccctatcagcaaatcacaatggaactttcttttatttgtcatagggctatgataaactattatagtagaaaaaatgggcaattaggcctatttaaggaggctaacaactatggctgtgaaaattaatacacagactggtatgatcgaaatttcaaacgacgtcatcgcgacggttgtcggcggtgcagttactgacgtgtttggtatcgtcggtatggctagcaaaaatcaaatcaaagacaatatcacagaaattttaagaaaagaaaattattcacgcggcgtcgttgtacgtcaagaagagaatggtatcgcagtcgacgtctacacgattgtcagctacggcacgaagatctcagaagtatcgcgcaatgtccaagaaaaagtgaaatacaatttggaaacgatgcttggggtaacagctaactcagtgaatgtctatgttcaaggtgtacgtgttctgccagactaaaggcagcgttcttaaggaggactaagtaagtgaaggtaacagaaatcagcgcgagtcaattccaagaaatggttgaggctggcgctaaacgtctgcaagttaatgcagaatatgtcaattcgttaaacgtttttcccgttcccgatggcgatactgggacgaatatgaatctatcgatgaccagcggtgcgactgctgtagtcaactctgcttcagataaagttggtgaattagccaacgttttggcgaaaggtttgttgatgggtgcccgggggaactcaggcgttatcttgtcacaattattccgcggtttttctaaagcaattttagatgtggatacattaaatgcagaggatttggcgaaagccttagttcatggggtagaaacagcttataaagcagtcatgaaacctgtagagggaacaattttgactgtcgcacgtgaatcagcgaaggctggggaacgcaaagctagacaaacagatgacgtggtcgaagtgatgtcagctgttgtcaaatatgggaagaaagcattagataaaacaccggacatgttgccagttttgaaagaagttggcgtagtcgatagtggtggtcaaggcttattgtttatttatgaaggctttttgaacgccctgaatggtgagttccaagcagatgatacgtatgaaccaagtccggctgaaatggacgaaatggtcaatgcggaacatcatcgcagtgtgcaaggtcaattagcaacagaagatatcaagtttggttattgtactgaaattatggttcgtttaggtgaaggtccaactgttgatagcaattttgattacgatactttccgcaactatttagatggtattggtgattcgttattagtcgttaatgatgatgagattgtcaaagtgcatgtgcatacagaacatccaggggaagtcatgaattatggccaaaaatttggcgctttgattaaggtcaaagttgataatatgcgcttacagcatgaaacaattttggaacatgatgaagaagtagctgaattcgaagccgctccaacagaacgtaaaccctatgcagtgatcgctattgctgctggtgaaggtgttcaagagttattcaagagcctaggagcagcctacgtaatcagcggcggtcaaacgatgaacccaagtaccgaagatatcttaaaggcaatcaaagaggtcaatgctgatcaagtaatcattttgccgaataataaaaatatctttatggcagctgatcaagcagcagaagttgctgacgttcctgtagtagttgttccaagcaaaacagtctctcaagggatgacagcgatgttggccttcaatggagaacaaagcctagaagaaaacaaaacagcgatgactgaaatgcttgactctgtagttagtggtcaaatcacgaatgcgattcgcgatacagcgattgatggtgtagaaatccacgaaggtgactacttaggtatggtcgatggtaaaatcattctttctgaagcagataaataccaagcgacgttagatactttaaacaaaatgattagtgaagatatcgaaatcattacgatcattgttggtgaagaaggaacacaggctgaggctgaaaaattaagcgaagcgatcgaagcaagctacccagacctagaagttgagatccacgaaggaaaacaaccggtctatccatacttgctttcagcagaataatatgaaaaaagtcggaaggagtgggccaagaatatctggctcgctcctgtttttttaggaaaatgacacccttatctccgaaataattgccgatagacagaacttagcatttgaaaaacgtattttaattgaaaggaggctgtttatgccgattcaagaatctgtatcggtgctgcctggtgtaggaccgaagcgtgcacaaacgttagctgatttaggaatcgtaacgatcgaggacttattgagttactatccttttcgttatgaagatattcaggaaaaaaatttattagaaatcaatgaccaggaaaaggttacattaaaaggtgtaatcgtctcggcgccagtggttagtcgttttggctacaaaaaaagccggttgcagtttcgaatgatgcaagatcacgcggtctttatggtctcctttttcaatcaaccctatttgaaagacaaagtcgaagttggtgaagagctggcggtttatggaaaatgggatgctaagcgaaaatcgctgactggaatgaagattttaggtggtaagcagacggaagaatacgcgccaatctatcacgtgactaaggctatccgtcaaagtaccttagttgatttaatcaaagtaggatttgaaaaatttggtgatcaggtaacagaaaacttgccagattatttattagaaaagtatcgcttgatgccacgaaagcaagcgatgcgggcaatgcattttcctaaagatccaaaggaaaatcagcaagcaaaacgacgagtggtttttgaagagtttttcctctttcaaatgcggatgcaagggttgaagaaaagtgaacgtagcgagaagaatggaatcgcgatccgttatgatgtcgaacgcttgaagcagtttacgcaaaagctgcctttcgaattgactgacgcccaaaaacgtgtgaccaatgagatttgctacgacttacgcagcaagaagcatatgcagcgtttgcttcaaggggatgttgggagtggtaagacggttgtggcggcaatcgccttatatgctactatgacggctggctttcaaggagcgttgatggtgccaacagaaattttggctcagcagcatttagaaagtttgaatcaactatttgatccattcgaattaacaactgcattactaactggttctaccaaaaccaaagaacgacgcgcgattttagctggtttagaaaatggggaaattgatgtggtgatcgggactcatgcgctgatccaagatgatgtacagtttgctagtctcggattggtcattactgatgaacagcatcgatttggagtgaatcaacgaagagttttgcgagaaaaaggactgcatccagatgttctattcatgacagcaacaccaattccgcgaactttggcaattactgcttatggtgaaatggacgtatcaatcatcgatcaaatgccggcaggccgaatccctgttaaaactagctggatcaaacctaaacaactggagcataccttggattgggcgaagcaggagttacaggcggggcatcagctgtatgtaatctgtcctttgattgaagaatcagaagcgttggatgtgaaaaatgcgacggagatttatgagcatttaaaggaatactatgcacctacttatcaggtcagtttgctacatgggaaaatgaagaatgcagaaaaagaaacaatcatggaagaattcaaagagaatcaaagtcagattttagtttcaacgactgttattgaggtcggagtcaatgtaccaaacgcaacggtgatgtttattatggatgcggatcgttttggcttggcccagctgcatcaattgcggggacgggtcggacgtggttcggatgcgtcttattgtatattggtagcaagccccaaaaatgacatggggaaagagcgcatgaaaatcatgactgagactaacaatgggtttgtattgagtgaaaaagatctagaattacgcggacctggtgaagtctttggctttcgtcaatctggattgccgcaattcttgatcgctgatctggtaaatgatgcaaatgttttagaagtggcacgagatgaagccaatcaaatttggcaggtagaaaattggcgtcagcagccagctttcgcaccattagcaggagcgttgaagcctactgaaactggagaaacatatttcgattgagtgtgctatactgtagaaaaattaaaaagcagtcagtcctgcaccctgtttctatcagagatgctggcggatatacgacttaatactcagacttatgttctagaaagtaaataaatacattaaaacaaaaaaggatgctagttcctcttgatgctgtagcatattagaggaatagtatgcggcttgagaatcagacttatttttcagaaagaaaaataaatacattaaaacgaaaaaggagagatttttctcatgaaaattgctgtagacgcaatgggtggcgatttcgcaccaaaagcgatcgtggaaggtgtaatgttagcgcaaaagaatcatccggaaattgaatttcaattatatggaaaagaagacgcgattcgtcaatatataacaaatgaaaagaatattacgatcattcatacggatgaaaagatcaatagcgatgacgaaccagtgaaggcgatccgtcgtaagaaaaatgcctcaatggttttagcagctcaagcagtcaaagagggcaaagcggatgcgatcttttcagcaggaaatacgggggcgctattagctgctggtttgtttgtagtgggacgaatcaaaggaatcgagcgtccaggcctgatgtccacattgccggttttaaatggagatagcgggtttgatatgcttgatttaggcgcgaacgcagaaaataaagcagagcatatccatcaatatgcaattttaggatcattttatgcgaagcacgttcgtggaattgaaaatcctcgtgtgggcttattgaacaatggtacagaagaaaccaagggcagcgagttaacgaaagaagcctacaaacttttacaagcagaagagagtatcaactttattggaaatgtagaagcacgtgaactgttaaacggtgctgccgatgtggttgtaacagacggatttactggaaatgctgttttaaaaacgattgaaggaacagctatgggcttgatgagcttgattaaaggcagtatcagtgatgctggggttaaagggaaaatgggtgctcttatgctgaaggatacattatacggtctaaaagacaaattggactattcctctcatggaggtgccgttttatttggactgaaggctcctgtgattaaaacccatggatctaccggacctgaagcagtggcaaataccatcgatcaaatttacacgatgctagacacgaatgttgttggacaattggtccagttttttgaagcacccaagggtgaataagaaccacgccaatttcgtgaaaaaggtagacaaagcaatcaaacatcagtaaaatgaactgtgaccttctggtaaaacatagacgaataatagttgatcaggcggaggtgaatgttgttgactcgtgaagaagtatttagcaaagttgctgaaataatttcaaatcactttgaaatcgataaagataaagtgacggttgaattgagtatcaaagacgatttaaatgcagactcaatcagtatcatggaatttgttttggaattagaagatgaattcggaacagaaatttctgacgaagacgctgaaaaaattgaaacagttggagctgcagttgattacattatggaaaacaaccaagcttaacaaaaaaaggtgcaccagcaatttgctggtgcaccttttttaacagttacaaaaccccaagggcagtcaaagctttttctagtgctgaaaaatttcttttaaagtgaaaaccgttcatcccggtttcttcagcggctaagatattcgctgctgaatcatcgatgaaatagcactcggcaggatttaagcggaaatggctgtaaaaggtccggaagatttcatgctctggcttagataatttccaatctgaggaaataaagatgccatcaaaaatactgtgactagggactttatcttcataaagataataatcctgcggggcatttgaaaggatatagagagacaaacctttttctttcaaccgtttaggaagttcctccatttgtggtatagcattcagcccgatataccaagtgtccagcaagtcttcggcgatagcatgcaattcttttggaagccgtgattttgcggaggttaaaagttcctcccgattcatcgttcccttatcgaaacgcagccagtccacagaaccaaaaatttcggacataagcatcttttgttgattcttatctgcagttttttccatgacaaaacgtggtggatcaaaatcaactaaaacatttcctaaatcaaacacaatattttttatcattcaaagccctcctaacaagtagataacgtctattaaaatccttttattgaacaagctgcaaaaaacgtttattccaaatattttcgtaaaaagcgatggtctcttcaacagagagaaaatcattgtcataggtggttgacccatttttcagcatggttaattgatagcctaagccatgggcaaattttacagtagcgtcaatgcagtactgggtttgagcgccgcagatttccaagctggtgatgtttttctgctgtaaatttttttgtaaatcagtatggtaaaaggaatttgcgtgagtcttctgaagaataagatcgttcggtttacgatcaagttcctctacgatttcccaggtttctgaatgtggaaccaaaatttcgtcacaatgctgaacaaagagaatcaatttattttgttctcggtagcgctggatacgcagattgacagtagtaattaactcagaaaaatggttgatcgtttctccgtcaaagcaaacacccttttgtaaatcaataatcaataatgcatcagaaagattttccatcgaaattcctccggtcgttttctttactttagcattttttagatgtaagaagaaaaaagtttgttgaatctttgaaaatttcttactataacgacttctgatttaaaattcacagaaaaaacagtataatagagcgtgatggaaatctcaaaaaaaggaatgagcccatggatacacagttgatcaatgaattgaaagaaaactacgacatcgtctttcacgatgtgaacttattggaacaggcgtttacccactcatcatatgtgaatgaacaccgtaatatgaatatttcagataatgaacggttagaatttttaggggacgctgtcttagaaattcaagtatcggactatttgtatcaccattatccaaacttgccggaaggacgtttgacgcgtttgcgttcggcgattgtgcgagaagaaagcttatcaaaatttgcaaaagaatgtcattttgatcactatattatgttaggtaagggcgaagaaaattctggcgggcgtgatcgtgcagcgttattgtgtgatctattcgaggctttcttaggggccttgtatttggatcaaggctacgatgtggcgctacgttttattcaaacggtcgtttttccaaaaatcgaagcaggtgttttcacgcgggaaatggatcacaagacacgcctgcaagaagtgttgcaaaaaagcggagatgtgacgatcgattatcgtttagtcaatgaagaaggtccggctcacgaacggatttttacaattgatgtatatgcggatgatcgtttgatcggttcaggacaaggtaaatcgaaaaaactagcagagcaagatgcagcggaaaaagcattgattaagattgctgcaaattagtttatatttcctgggaaaattttaggaggaacattttgtatttaaaacgaattgagatcgctggcttcaagtcttttgctgatcgtaccaagatcgaatttgaagaaggagtgacagcggtcattgggccaaacggcagcggaaaaagtaatatcactgaagcaattcgctgggtactcggagaacaatcggcaaaaagtctacgtggcggcaagatgccggatattattttcgctggttcagaatcacgaaagcagttgaatattgccgaagtaacagtagtattggataataccgataattatttaccgctaggctttagtgaagttagtgtgacaagacgttatcgccgaacaggtgaaagtgattttttcataaataaaaaagcctgtcgtttgaaagatattcaagatttattcatggattctggtttagggaaagaatccttctcgattatttctcagggaaaagtcgaggcgatatttgccagcaagccggaagatcgccgaggaatctttgaagaagcggctggcgtcttgaaatacaagcagcgaaaacgcaaagcggagcagaagctttttgaaacggaagataatttgagccgggttcaggatatcatttatgaattagaagatcagctgactcctttagctgctcaaagcgaagcagccaaggagtttttggcgctcaaaaaagaattaactgcgacggatgtcagtttaacagttgcgaagattaaacaaacacgtgattcttgggagtcagcgaagacagattttgaagaactctccaaaacagttgaagaaaaaagccgttttatccagcaaactgaacagcagttaggcacgttgagagaaaaacgcggttcattggatgagcagctggaaactgggcagcaacaattgctgcatttatccgaggcgttgaagcaggctgaagggcaaaaagcattattaagcgaacgctcaaagaatacgcaaaagaccagcgctgaatatcgtgaaactttgaatgagcaacgtaagaaaaaagacgatgcacaggcgaacttgcaggaagttcaaacgcaacaggcggataagcaaaccgaaaaggtcgccttagaagaaaaaatccagcagctgacaaatgaagcggagaaatacaagaaatcgccgaaggaactcttggaggatttgcgtggtacttatgttgaattgatgcaagagtctgcaaatgtcagcaatgaattaaagtatttagaacgtcaatacacacaagagactgctaagaaccaacagagtgtgacacgctttgaagcgttgcgagatcaactagaagaattgacggagcagcagagcgcggcgcagacgaaaactaaaacgcttgaagctcagttgacggaagaacaagaaaactaccgacgcttagcggaagagaaaaacgcggcacagcagcaattgcaaaaagaacagcagttaatgtatgacatgatgagtcaggttcaacaagcgcgtgcgcgacaaaaaagtctgcaagagattcaggaaaattatagcggcttttatcaaggtgtccgcagtgttttacagcacaaagaacaattaagcgggatcgtcggtgcagtagcagagctgatcgaggttccagaaaagtataccttggcgatcgaaacggccttaggagcctcggcacagcacattatcgtagaaaatgagaaggatgcacggcaagggatcacatttttgaaaaaacaacgtagcggtcgtggcacctttctaccgttaacaacgattaagccacgtagtttaggggctcatcactatcaagcaatcaaagacgtagacggctttttaggtgttgctagcgaattagtttctttttcagaaaatgttgctccagtcatgcaaaatttattaggagcgatcgttattgctcgagatcttgatagtgctaatctgcttgctcgtcaactgcgatatcaggttcgtatagtttccttagatggagatgtgatgaatgctggcggatcaatgaccggtggcgctacgaagcaaggaaatcgtgggaatttgtttaatcaaggacacgaattagctgaatggaccaaacgttatgaagaaatcaatcaggcgttacaggcaaaagaagcatttgtccgtgatttgcaagcaaagattgcggatcagacggaaagtctagaaacattacggacacaaggtgaacaaacgcggttggcatatcaagaagcgcaaagtagtgaagaacgtgttgcaacggaattaacacgtttgcaaaaggaacagagcttgttttcttatgaagcgaaagagctggaaagcttcttgaatgattatcaagtacaaaaagaaacgttggaatttaagcaagtcgagttgaaaacccagcaagataagatcaatcaagagatccaacagcttaatgaagagagcgaccagctagaagaaaagcgtgccggtattaatgcagaattgagtcgcttacaggcggactatgcagtattagatgaacggctgttgtatttggagcggcaagcactaggttttgaagaacagattaacgagttgaccaatcagattgtaaacttagaaaatcaattactagcactttcaagtgattcatcggatcatgaagaatcagaagaaagtctaacccagcgtttgacagaattagctacagcacgcgaacatttgcaggagcagctggctgtttggaaagaaatgcggcaaagtctgcagcagcaagtggatcaagcagatagtgagttgactgaagccaatcgcgagcagaaacaattattagcacgtcaatcacaagccgatgtccaaaaaaaccgttacgagttgaaattggacaatgctttggcgtatttgcaagaagaatatagtttgacttttgaaggtgcggaagcacaagcggaccctgaaattgatcagcaggttgcgcaaacggaagttagtcacttaaagcaagccattgaaaagcttggaccagtcaacctaaacgccatcgaacaataccagcaagtggaagaacgctatgatttcctaacgacgcagcgagatgacttattatcggcgaaggagcagctgttcgaaacgatggatgaaatggatgatgaagttaaaacgcgtttcttcacgaccttccaagcgattcgtgaaaaattcaatgtggtttttccaaatatgtttggcggcggtcgagcggaattagtattgacagatcctgatgatttattgaataccgggatcgaaatcgaagctcaacctccaggtaaaaaactgcaaagtttatccctgctttctggtggtgaacgggccctgacggcgattgcgttactattctcgatcatccaagtccgtcccgtaccgttctgtgtgttagacgaagtcgaagcggcgttggatgaagcaaatgttgcccgttttggtcgctatctgagtgcctttcaaaacgatacacaatttatcgtggttactcatcgtaaaggaacgatggaagcagcagatgtgctctatggtgtcacaatgcaagaatccggcgtctcgaaaattatttcagtgcgccttgaagaagtgaaggaagatgggaaatttcaagtgaaggaaggggaacttcggaaatgataaaattaatcgcgattgacttagatggtacgctattgacggatgctaaaacaatctctgatacaaataaaaaaatattggcaaaagcgaaagcacggggtgtgaagattgtgatctgtacaggccgtcctttaatcgctatcaaggattacttagcagagctaaatttgcttgatgcagatgattattcgatcactttcaacggcgggttaatccagaccaataccggtgagattttaggcaagacagcgatggatttggcagatgtaaaacatatccatcagctgttagaaaaaattgatttaccgatggatgttttatcagatgctttatgttttcagcttgagacatcagcggctcatccttcaacctatccaacgatgaacaaggctttaacttacgtttcgaaaacgatagaagcattaaaagaggatgcgctatacaataaagttgtctcagctgtggatgtggattatttagatcagcagatggcgttgatcccagcagaagaatatgagcgctttgagatatttaaaacacggccaaacttactagagtttatgccaaagggcgtgactaaagcctttggtctctctgttttaggagaacatctcgggattgcagcgaatgaaatgatggccttaggtgatgaagccaatgacttatccatgattaattatgctggtatgggtgtagcgatggaaaatgctactgacggcgttaagacggcggccaattttgtcactagaacgaatcaagcggatggggtggcacatgccattcaaaaattcgtattcgatgaatggaaataagggggattttacatgggattatttgaccgcataaaaaaagcctttagtggtgaacagaatgaagaacctgaaaagcaagaagaagtcgttgaagatcaatcagtctccgaggatcgcgatgaggtagaaaccggggaagtagttgaaacaccaagcaatgaagaagccactgctgatacggatgaggagcaagaaggggaaccggaaaaatcgtctgaccaaatcgagaaatcaatggagcttccgcaagaaataccaacacaaggattaaaaagtgatgatttagaagtaaaagaagagcctgtcgattcagcaattggtagtgaagaagttcaggttgaacagacagaaattgaatccacacctatagaactgaaaacagaatcggaatcgatagaagtttcagagctggaatctgaaaacatagttcctgctgaacctgagcaaccggaagaaaccgttcaagagaaatacgacaaaggtctagagaagactagaaaatcatttggtgaacgaatgaatgagttgtttgctcgtttccgtcgagtggatgaggatttcttcgaagatttggaagaaaccttgatcggtgccgatgttggtttcgatactgctatcaaactaacagattcattacggcaagaggtcaagctgaaaaatgctaagaaaccggctcaagttcaaaatgtcatcattgagaaattggtcgacatttatgaagcggaaggcatcaacgagaataatgcaattaatctgcaaaacgatggattgagtgtgattttgttcgtgggtgtgaatgggactgggaaaactaccagtatcggaaaattagcgaaccaatacaaaaacgaaggcaagaaagtcttactggctgcagcagatacgtttcgtgcaggtgcgattgatcaattagttgtttggggacagcgttcaggtgttgaagttgttcgcggcaatgccggcggtgatccagcagctgtagtatttgatgctgttgacaaagctaagaaggaaaattatgatgttctgctgattgatactgcaggaagattacagaataaagtcaacttaatgaacgagctggagaaaatcaaacgcgtcattcaacgagaatttccaacagctcctcatgaagtgttattggtcgtagatgcgacgacaggacaaaatgcgctagttcaagcacgacaatttaaagaaacaacggacgttactggtttggtcttgacgaaattggatggaacagctaagggcggtattgttttggcaattcgcaatgagttgcatttgcctgttaaattagttggtctaggagaaggcttaaatgatctggaagcttttaacccaaatgatttcgcagtcggcctgtttaaaggattattgcaagaagagtaaaaaaagagctgttgagtccacctcaacagctctttttgcaatttttaaagtatagatgttagttacaaataatgattggctgtttagcaaaatgggctagtgcttttcttgaaagtaaggtggaacgtgtagactgaccttgttttgtcgtgcattcgcgtccattatcttctggatatcatcgcaatgaaattggtgttgacgatgtgggcgcaacattacaaattctttagccccactcttttgacttagatgagagggatcatttatcatcggttgtttttcttcctgcataagcgaggcctccattctttttaataaaagacgtgtagtgattatttttttgactaatctttttgttattattatttaatcatattatcatatttaatactatctttttttaagcattttcgttctgtttctggatattcttctatataatgtagcatgggagggctatggacaaatgaatacaaaaaaaatgatgacacaagaaaaggtgaagccttttttactgcaagcgcgttatggaattgaaaaggaaagccaaagagtgactttacacggtgaacttgtacagaccgatcatccgacatctgtaggaaatcggagctttcatccttatattcaaacagatttttctgaaacacaattggaattgattacgccagttactgagtctgttgacgaagtattggcttatttagaagcgattcatgatgtggcgcaacggagtatgccaaaggatgagatgatgtggccattttctatgccgccagcacttccggagaatgaaggagatattcaaatagcgaaattagagcgacatgcggatgttttgtatcgtcggtatctagctcgtgaatacggcaagcggaagcaaatggtaagtgggattcattttaattttgaatatggcttagatttgattcggcaattgcatttagcatgcgaggaagaggtttcaatggaggacttcaagactcgtttatatatgaaaatcgcccgcaattttttacgttatcgttggctgctgacctatttatttggagcaagtccacttagcgaagcacgctattttgatgatgaagatcgtccaaaggagcctgtccgcagtattcgtaccagtcattatgggtatgtgaataagccagatgtgcaggtctcttatgaaactttgtcgcgatatagtgaagatctcgctgagaatgttgctttaggtcgtttgtcggaagaaaaagaattttatgcgccaatcaggatgcgtggaggcaaaaaagttgtagatctatttcatacaggaattcgttatgtggaattacgtaatattgatttgaatccctttgaccgcgtcggaattgatgcagctgagattgaattcatccatttgttcatgctctatttactatggacagacgaaaaattaccagcagatgaatgggtagctgaaggtaatcgtattagtgatgcggtttctttagagcatcctgcaaaaacaacggcttatttaacagaaggacaagcgatttttgctgaaatgctgcaaatggtggatgaattagaaatagagggtgccgaactgctgaagaaatatcaagcatggctggattatccggaagaaacgctagctgcaagaatattagccctggatgaagcaaacggccaagctgctgtagcaactgaattggggcgtaagttttatgaacaggcttgggcgtatccgtatcaattggcgggctttcaagaaatggaactgtcaacacagaatttattatttgatgcgattcaaaaggggatcgaaacagaagtgctggatcgacaagatcaatttgtaaaactacagcacgacgaacatcaggaatttgtcaaaaatggcaatatgactagtaaagacacatatattgcgccattattgatggcaaataaaacagtcactaaaatcgtactagctcgagcgggtttccgtgtgccagatggtgaaacgtttggtttgatggatgacgcgaagaaggcctatccgcgatttgctcaaaaagcgtttgtcattaaaccaaaatcaacgaattatggcttaggcattacaatctttaagggtgaaacgtcaataaccgatttcaatgcaggtttagcactggcttttgcagaagacgatgaaatcattattgaagaatttctgccaggaacggaataccgattttttgtgattgatcatcaagtaaaggccgttttactgcgaataccagcgaatgtaattggtgatggtgaacgttcaatcgaagaattagttgctgaaaagaatgacaaccctttacgagggacgaatcatcggtcaccattagagaaaatccaattaggtgatttggagcagttaatgttgaaagaacaaggattgcgaatcgacagtattcctgaaaaaggtcaacaggtcttcttgagagaaaattcaaatgtatccaccggcggagactccattgatgttacggatgatattcatgaaagctataagcagctggcggttgatgcagtagaagtactaggcgccagcatcagcggcattgatttgatcatccctgataaggacaagccatatgaggcacacgaggattatggaattatcgaagcaaatttcaatccgatgatgcacatgcatatctatccctatgctgggaagagtcggcgtttaacgttggatgtgctgcgtttcttatatcctgaaatgacaatctaaaaaaaataaatccacgctgcattggcaacgtggatttattttgcataatagttgtgaatgaatgtatcaatctctgacaatgaatcagaaaataaaaccaactgccgatcctcctttgataaaaaggtttgctccaccatctgatcaaaaaatgcctgcaacagctgatagtagttttttacatcaaagaaaatacagggattattattctgtccaactcgtgcccacgaaaaggcttcactgatttcttcgagagttcccacaccgcctggtaatgccagacaaacatcgctatgctgcatcaaggcctttttgcgttcatccaagtcgttaacagtaatcatttctgttagtccagtgtgtatacgttcggtatcttgtaaaaattttggcatgatgccaattacttttctattcccagccaagacgctatcagctactacgcccattaagcctagtctactgccaccatagatgagctcgtgattattttcgacaatccattgtcctaattcctttgcggccgctaggtaggcaggatctgctccaaggtgagcaccgcagtatacagcgatgcgcatatgatcgcctcctattggatttaagaatccgtttattcgggtgaaattagagctcttccagctcgattgtttgttttgtctcttcgaccgtcaggccagtcttttcttcccaccaagctttcatttctttttcgtaattatcggggaagcgattgacggtatcaatcaggggttcgccttggatcttcgcgtggggaaagttcatagctagattgaatttcaattctttcagcaggctgtagtattggaacatcatataatacatctcttcatcatcaccgctagccaatactagcgccgcgcgatcaagcatgaaacctaaacttcgcatcataaataagaagcctggtagttcttctctttcgatatcatcaacttcctttaaaatatcaatatgcagatcaagcgcttgcaataaatcagtttgcaaattgtgataagtaaccatttagatcccctcctttttgtcttccagaaaaaataaatctgtttaataaaacttgtaaataaacagtttgaataatttctcttatttaagtatagcacagacataaaatttccaaatcaacatttcagcttttgactcgcattattgtggtgagttgtgtaaagtagaccaagaaggaggctgtgaaatgggaaaattagcggtgatcacagatttacatgctgatatcaatcaccttggcgagtcagagttgaccaagctttttgagttgttgcaggaatatggagcaacccgcttacactttgctggtgatacggctaataagatcgaccagacactagcgatcaatcatttttttcgctcacgtgggctgccaacaacctttaatttaggaaatcatgagatgggaaatgttaaaggagagcagatgattgagcattatcctgacagccattttctgaatctacgctatgtaccgttgaatcagcaaaccgtattattaggctttaatggctggtacgattatggcttttctgagcttagggatccgcagcaaattcgttcgatcaagaatatttattggtttgatcgaattattaaacgtttttctgatgatcagacggtggataaagctatcttaagtcaattgcacactgtcttagatgatttggagcaaaaaaaatatcaaattatcttagcaacgcattttgtgccgaaggaagaatttatcgtgcacctcaacggaaaatatcagatttggaataaattgaacgcttttttaggttctcagggtttaggagaattattggatcaatattccaatattcagcaggtcgtgtttggacatactcatcggcgctttactgatcaaaagattcaaggaacgacctatagctgtcggccattagggtattattatgaatggggaatcacacgggatttcgttttggacaatcaattagcagaagtctttattccaatgaaaatgcggagcctattgaataagtatcaagcggaatttgccgcttataaagaggcccacttaatcgaagaatttcgaaaagcagtgacgttgattgcttattgattttgtattaatgggaagggattttttatggaaacaatgaaacgtttttttagacagtttactcagacgacaccattcgtattagccaatacgatgattgttataccgtatttactttttatgcatcttatcaattatcaatcttccgttacggtattgccgtttgttttgttttatacttttcgagtaactgggatttttttgatacgaggattgtatcgctcgattgatcaatatacgttattgatggtgtcactcttaataggtggaattggttcatttctaacattaattggagcattacattttactttctatttatttggcagtatctttttaggactaagcgcagcatggttgcccccagcaaatacgagcgtaacttatcttgaaaagtctaaaggctttcaaacgatgagtagtcaccgctatttggcagcactgatcgttttagttcctttattttttggaacgacgctctccttaacgcttcaagcggtgattgtaccgagtatcgttacgttttattttgtttgtgcatatcatactgtaaagcactatccgcattatgaaatggattttaaggagttaacaaaacagtttttttctatttcagaactaatttggttcctattgttttttgcggcactctttttacttcgtagcggtcgtttgctatttaatgagtccatgctggattatgcgattatcttattcgctggtatttttatgttagctattgttgtggtgaatcaagtaaaagatcgttggaaactaccactttggcaaaatatgttaacatttcttaatggtatgctgggcaattttatttttctttttggagccttttatgttgctgtctataaaggccccgccgcacaaggaacgtatttgtttttaccatatttgttaggtgtaatcagttcgctagttttggctggcagcgtacgtcgctatttcaaaaatgatttgcttgttcaacttgtgggttcagccgcagggttagtattgttgagtattcgcttcatgtttccaatcgcgatttttgtcttaaccttctttcaaaagggcacgagtgcatggttaaatcgtttgtattatcaaacagaaacaatcgaaccacagcaacgtcttaccgcgaagttctcaacgtcaaataagggcagtatcactcaccagtttatcttgatgtttttgttattgatcacgctgcaattaaaaaaactaccaatcaaagatatctttttactgcgcagcttgcacacaccggagatccttgcaacaatggatatagtgaaatttgcttcgatcattcttttattgattggtctttgctggattggaagggttggaaaacatgcgtttgatcattgatggcgacggttcgccagtgaaagatacgacgatcgccgttgcaaaaaaatttggattaccagtagtaatcgtaacgagtatcgatcattactcgaaaaaagaataccccgatttcgtggagttcatctatgttgatcgaggggcggattctgctgattttaaaatcgtttcggtcattcagccggaagatattttgattacccaagattacgggttggcttctttgacgttggcaaaagcagcccatgttttacatcagacagggttggaatatacgcagatgaatattgacgctttactgacgcaccgttttattggtagtaaaatgcgtcaggcaaaacagcgtacaaaaggaccaaaaccttttacaaatgaggatcgcgagcattttagaagcgttctagaaagcttggttcaacagtctttgatgtaatctaaatgataagcattgtaataattgtaaaatttctttttggggattttgatttttgtgctaaaatgttagggatcagaaagtaatggaggatactcaggtgaaaataattttactttatggtggaaagagtccagaacacgatgttgcgattttatcggctttttcagttatttctgcggtttattttgattattatcaagtacagcttatttatattgataaaacaggccagtgggtcaaaggccccttgttgacagaagcgccagaaacagatgaaacgttacgtttgacgtgggatccgactggaaatgaagttgaaggtttcagcggcaaagtaatcgctcctggcgatatcaaagaagataatgcgattgtttttccagtcttgcacggacctaatggtgaagatggcacgattcaagggttcttagagacattggatatgccttacgttggtgcgggtgtaatgacgagtgcttgtgcaatggacaaaattatgacgaaatacattttgcaggcagctggcatcccgcaggttccttacgttccagtcctaaaaaaccaatggaaagaaaatcctaaacaaatttttgataaatgtgagggaacgttactgtatccaatgtttgtcaaaccggcgaatatgggctctagcgtaggaatttcacgtgctgaaaatcgcgaagaactgcaaaacgcattgcaagaagcttatcgctatgattcaagagctttagttgagcaaggcatcgatgctcgtgagattgaagttgcggtattaggcaatgacgatgtgcggacgacattacctggtgaggtcgtaaaggaagaagcattctatgattacaatgctaaatacatcaataatacgattcaaatggcaattccagcggatgtgccggaagatgtgatgcaaaaagctcgcgattttgcaaaatcagcctatacaatgttaggtggatcaggattaagtcgctgcgactttttcttgacaaataaaaatgaattattcttgaatgagctgaatacgatgcccggatttactgagttcagtatgtatccattgttatgggaaaatatgggcttgaagtatagcgatctgattgaagaattgattcaattaggaaataagcgctacgaacaacaggcgcgttttgaataatcaagtagctgtttagtcacaaacaggacttgagacatgattcgaatgaatgatgtctcaagttccttttagcgtccggcttatcgcatctgttcagtactcaaaaatgaacgggtttgcggagcctttgcaaaagtcagaaacaaaaatttgggaggaacaccatgaattttacaacgacaatcatcagcaaggccgttcaaggtaaagtattggcggaaaatgaggtgaccgttactggtgtcgaattcgattcacgaaaaattgaagccggcgatttatttgttccgctacagggaacgaatgatggccatgagtttgtagcaaaagcaattgaaaatggagcgacagcaacattatggagccgtgatccagctacagcacctgaagatatcgcagtgattttagtgaaagataccttgttggcttttcaagcattagcaagctattatttactggaagaaaatccagatgtgatcgcgattacaggttcgaatggtaaaaccacgacaaaagatatgactgaatcagtccttagccaaaagtttcggacatataaaacacaagggaattacaacaatgatattggtttgccgtacacgatcttacatatgccagaaggtactgaaaagctgattttggaaatgggaatggatcatgcaggggaaatcagcgtgttatctgaactggctgaaccagatgttgcggcaattacaattattggtgaagcccatatcgaaaacttaggttcacgtgaaaaaatcgcagatgcaaaaatggagattatgacaggcttagcctcggatggtctgctggtgattccggcgaacgaaccgttactggaagaccggataacttcattgtctcaaacggttcaaacagtcggcattcaagcaggagagctgtctgctacgatcctgaacgagagtaaaggtgcgacggttttctctgtcgatgacaatggctatcaaatcccattaccaggaagctacaatgtacaaaatgcattgatcgccatggcgatcggtcgctggtttgggttaaataatgacgagattttccaaggcttggcgtatgtccaagtgacgcaaaatcgtacgcaatggttgaaagcaagtaatggtgcagacattttaagtgatgtttataatgccaatccaacagctatgggtttggtattggatacttttgcgaaattaccaacaaacggtcgtcgtttagccgttttagcggatatgttggagttaggtgacgattccttctcattacatacgagcatggtagaacatataaatgatcaggattttcatgaaatctttttatatggagatgaaatgaagggtctaaaggtagcgttagctgatcgttatccaacattagcggtacattactttggcaaagaggataaacagcaaatgttagaagacatcaaaaacagtttgcaagctgatgacagtattgttttgaaaggcagtaatgggatgggcttgtccgaagtcgttgaagcattgcagaagtaatgaaaacttgcagaaaacgaaatgatgtgctaaaattagccattgccgagaaattgaagtaatgattgaacgagtcatctaataaattaaagattcgctagcggaagattcgctggcttaccaattattttgagaagcggttggggcatttttcagttgaatgatgtctcagcccctttttgtgagagatgatccttccgcctgacttcgcggagcggtttttcggtagtatcgccaaggacggcaactaaagggacagttgcagaccaaacgcagataccaaaccatacgctctaaatgataaggtcaacagacattaggaggatatcatttgaaattcaaagaactaaaattagcaccagaactattagtcgcaatcgagcgctcaggttttgaagaagcaacgccaatccaagagcaaacaattccattagctttagaaggaaaagatgtaatcggacaagcgcaaacaggtacaggtaaaacggctgcttttggcttaccgatgctgaacaagatcgacacaacaaaaaatgtattacaaggacttgtcatcgcaccaacacgtgagcttgctatccaaacacaagaagaactgtttcgcttaggtcgcgataaaaaaattcgcgtacaagctgtttatggcggagcagatattggtcgtcaaatccgcggtttgaaggaccgtccgcatatcgttgtcggaacaccaggccggatgttggatcatattaatcgccacaccttgaaactagaaactgtggaaacattagtcttggatgaagcggacgaaatgttgaacatgggcttcttagaagatatcgaaaaaattatcagtaaagtccctgcagaacgccaaacattgttgttttcagcaacaatgcctgatgcaattaaaaaaatcggcgtgaagtttatgaaaactccagagcacgtgaagattaaagctaaagaaatgacggctgatttgattgatcaatattacgttcgagcaaaagattacgaaaaatttgatgttatgacacgtttgtttgatgttcaaacaccagatttagccatcgtttttggtcggacaaaacgtcgtgttgacgaattggctcgtggtttagaagctcgcggttataaagctgaaggtatccacggtgatttatcacaacaaaaacggatgagcgttttgcgttcattcaaacgtggtgatttggatattttagtagcgacagacgttgctgctcgcggcttggatatctcaggtgttacccatgtgtacaactatgatattccgcaagatccagaaagctatgttcaccgtatcggccgtacaggtcgtgctggtaaaggtgggatgtctgtaacgtttgttacaccaaacgaaatgggctacttgcatgtgatcgaaaacttaacgaaaaaacgcatgaacccaatgcgtccaccaaccgaaaaagaagcctttaaaggtcaactaggcgctgcaatggaacaaattcaaaatcaaatggaggaaaattccgacagcctagaaaaatacaacgaatcagcaaaagaattattagctgcttattcaccagaagaactggctgctttattattgaagactacagccaaagatcctgctgatgcggttcctgtaaaaattacgcctgaacgtccattaccttcaaataaaaaaggcggtttcaatcgtggcggcaaacgcggcggtggaaataaccgtggcggcggacgtggaaaagacaactaccgtaaagaccgcggtggtgatcgtgatcgtaacaaaaataaaaattacggcggtaataaatcacgtagcaacaataaaaatacgaaccgcagcaatgataaaaaacgcggattcgttattcgcactaactcaaacgattagtttttcagaactatcaaagccatcgatctttttgattgatggtttttttcttgttatgaaggacttttcatggattattaaaaaaaaatcgtagcatttaaagaagtctttggtaaaataaagatgttacttgaaagggttgagagcatgattaaaggaatcgggatcgatgcgactgagcttgaacgggtcgcaaaaatcattgaacgccggccgcattttgtggaacggatattaactccagcggaacagaccctttttgctagccattctccacatcgtcaggtagaatttctagcaggacggtatgcatgcaaagaagctttttctaaagcttgggggacaggcattggaaaagtcagttttcaagatttagaaatattacgcgatgataatggtgcacccgcctttacaaaatcacctcatcagggaaaggtgtttgtcagcttgacccatacggaggaactagcaatcgcacaagtattgctggaggaatagaaagaaggacactaagtttatggttgtaacgtatcatcgaccaacgagagctattatacatagaaacgcattgagagagaatattaaaaatgaaattgatcgattacctaaaggggtagaattattcgcagtcgtgaaggcagatggctacggacatggagcggtggctaccgctcaacaagctttatcagttggcgcaaccggattttgtgtggcaactctagatgaagcgatggaattacgagaagcggggatcactgaacccatcttagtattgagcgttgtatttccaagttatttatcattggtgattgattatgatttatcaattactgtagcaacaaaggaatggttaattgaagcacaagaggtactaagagatttagaggaggcaacaactccaataaaaattcatatcaaagcagatacaggtatgagccggctgggttttttaacacccgaagaagtcaaagaggcagctgcaattattgaagcctctcctaatatggtctgggaaggtttgtttactcattttgcgacagcagatgaaaaggatacaagttattggcacaagcaagcggatcgctttaaacacgtgatcgaagcactagatcatcttcctcgttatgtgcattcaagcaacagcgcaactgccctttggcataatcaagagatgccgggaaatatgattcgttacggtgttgggatgtatggattgaatccttcgggtcatgaattacctgaatcttatccattgaaaccagcaatggaattagtatctgaattgattcaggtgaaggaattggctgctggtgagggtgtcggctatggaaaaacctatgaaacacctgcgaaagaatggattggcaccgttccaatcgggtatgcagatggttggctacggaaaatgcagggtttttcattgttagtagagggccagttttgtgagattgtcggccgcgtttgtatggatcaattaatgatccgactgccgcgtgattttaaggttggaactaaagtcacattgatcggtgaaaataatgggcaagagattacgatgcaggatgtagccgaccacttagggacaatccattatgaagtttgttgtatgctttcggaacgtgtaccaagaatatatcaagagtaaatatataaaaaaattctgaagctcaggaggaaaattatggttaagcgtggtgatatctatttcgcagatttatcgccagttattggttctgaacaaggaggcattcggccggtgttggtaatccaaaataatttgggcaaccatttcagtccaacgatcatcattgcagcgatcacggcgaaaatggcgaagcctaaattaccaacacatattggaataaaatcgaatggaaccggaattgaaagagattcggtaatcctattagagcagattcggacgatcgacaaatctcgtttaaaggaaaaggtttgtcatttggatcgttgtctgatggcagaagttgacgcagctttgcgtattagtatcggcattgaaacgatggctgcggtcacaacgaatcttacataaaatcaactttttgttggttagccaagatgcggtttgttgctattttttatctgtctgatcatactgcattttttcgaattttttaattataatgataaaatttgggtttggattcttaatactgtaatttatcttagtttatcgagggatacaacgattcgttgtgtctctttttttgcggttcaacgatttatctatcaatgatttgtagtaaaccagaagtttctcattgtatactagggataaagaaagaagagacgagggagtaggatggttgaaatcggagaacagcttaggtattttcgccaaaagaaaaaaatgagtcagaaacaacttgctgagcttttacacgtcacaccgcaaaccatttctaagtgggaattaaataagagtgcaccagattatgaccagctgattgttcttagcaaaatttatcgaaaaagtattgatgcgcttttagggcaggcgaagcctagttttttagattatttagctgattcacagaatgttagagataaaatcgccttttatggaatgcgtgtcactgaagggagggaaaatcatggagaggattcgcaaaatcaataaactgcttttgattacctataatttaggtggtatctgcttgatgatgattggtgcaatggtcggggtgcccggtcctccaggttatgttccgatggggataaaggtcgctactggaattgtttttggaaccatgattatcgcgcacattgttcgctttcttctagaaagaggattgaaaaaaacaggctgacatgaatcagcctgtttttcttatgcttgtgcaaagacgatgagattgactgtgtcagtgatacaggtttgtaaagtaatgcgttcaccaccgcctgctgatgtgatttgatcccagttgccttgtccagaatggatatctctgccgctgtcatcgacttgaatgataccattcactatatatgtcgtggcgttacctaagctatctgtaactataattggacttcccgcactaagtgaaaaaattgaggaaaagacgcctggattatgaccaataaaatgagtattttggttatctgtgccagattgtatcggattaccgccccaagtcgctgcaacggaaccgctgttgatgattccttgaccattaccttgaccagcattttgataagggatagaagttcctaaaagtgcaatttgatttggctgctgtacggatttttgttgaggaggagcttcatttgttggttttgccgcttcaggcgtgacttgtaatgtttcttgtgcaatttcgacgggttcttgttgaatgggctcttgagacttttcttctgattgtggtgtttcgattggggcgcttgttactgaagattgagtggctgaacttttggctgtttcttgtgacgtttcttttgaagaggaggcaggtgtttgatttggttgagcttctttttcaacctgcggcttttgaacgcttttttcttcttcaatgataatcagaacagttcttttgtcgtaatcttgtttgttttttgcagacaaggttaaagcgtagcgaccaggtttgcttgtgttaatatttgtgtaatttagtttaacaggatggtggtcatcaccaaccgctttgtagtactggttgggattgaatgagtcattcgtattgatcgtaactttgtcttcgccataaatccttacttgacgctcatgtgtcactttccttgattgagactgagcatcggaaatagtagaaaaaatgatcagactggctagaaagaaaagacatacaataacatctgaaaaaatgaatcgttttctcattgatgaattcatggaaaacaccccttttcctgatttgcttaaatgataaagcatggcttgataataagaaataaaaataacataatatttaggcctgattgttatttgtggattttagttaaataaatatcaatatttttccgttttcaaaaggttattttatgatataatgaccaaagaatgttataatccaaaaacttaaaaatgcatattcgatttgaagaatagtgacaattgactgaggagggtatttttgtgcggagattacttaaaaatacaacacaacgacgtttagccattatcggtgtattaagagatttgattggctggcagaatccggaaatgattgctgatttgttggaatgttcggtaaaaacgattttgtccgatgtagacgcgatcaataatctttggggtgagcacgttgggatagagtattcccgaacaaatggattaagattaaacgatgcccttcacaataaaacacgtcagctagctagaaatttgatggatgaatctgaggcatttatatttttagaacggctcttttttcagccaaatgaggatatggactactggatcaatgccctttatatcagtgaggcaaccttctatcgtatgattaagcaacttgatagagttttaaatgaaagaggattagtccttgaacgtagaccgtttcggattactgcaaaaaatgaacgctgggtacgcgtcttttatgtacaattatttttagaaaaatatggcgtcaatgaatggccctttgagctggagcgtagtaaaatgattcatttcattaaaactgccaatcaatcttttgatattgcttacaatgatcgtgaaattctggaaagcagttatttactggcaattattgtcgtacgaacttcgcaaggatttcagctgacaagaggtgagaagtatgatttgaaaccagcattgattcatcaaattttgaccttacgtccagaggcggatcgaatcgttcaaaataccaattatacagtgacagatcactggcattatgatgtggcgaatagtctattttgcccttgctttatcacacgctttgatccgaactgtcagatcacgttgaattatttagagaattttttaggtgaattggagcaggtatacgatttgccgctatcagataaaggtcggaaaaaccttttgcaaaaattactacagatccaaaccacctatcaagtatggccgtatccaaaatcaatcttgtttgattcggcggcgtacttttcacgaaatgcaaaggtgcagtatccgcattttacaaagtatgtccatcaactattgctacgaatagaacgaaagacgggggaaccttggttcagtcaattttatttttcggtggtacaagtattgtttaaggaatgggaaggacttgctcattcactggatgaacatgccgctaaggtgaagatttttgttgtgagtgattcgggggtaagccacgcgaaaatgattgctgaactgattcaaagtcgtttttattatcgggtagtgattgaaactcatgagggctcagcattggattttgaacatgatgaaagcttcatggagtatgatttggttattgcgaattatccgatcaaaaattattcctatagtaatttaaagattgtagatgattttttgactgaaagtgatctgacttcgattggttcttatgtaaaagaaatacgttagaaggctctagttgggtcttcttttttgtacctaaagaaatgcgattgctttactaaaggtaatggattacccagaaaaaattgtggatcaggctcagaaagaggcacgctatttcgatgagcagcggacttggccaattgttggtagtgatgaggtgtaggtagtttcgttttgaggaaagaatcatcctaagctcgggatggttcttttttatgaaaagtagatgaatttattagaacttttgaacaaaaatctctatactagaataagcaattattaatgaaaggacgtgaatgcatgttaaaaaaattactggcaaatgtcggtgaatataagaagcaaagcctgcagacacctttatttacgatgggggaagtcttgatggatgtgatcatgcccttgattatggcaggtctgattgataacggaatagaaaaaagtgatacaaatgcgattttgcgttatggaggcttgctctttttatgtgccttgtttgcattagcgatggggacgttaggtggtcggacagctgcgatcgcttcagcgggatttgcgaagaatttacgccataatttatttgagcgaatccaaggtttttctttttctaacattgatcgtttttcgagttcgagtttaattactcgtttgacgacggatacaacaaatgttcagaacgcttatcaaatggtgattcgaatattggttcgttcgccgctgatcttgattttttctttagtaatgacgtttcatattaatcgggagctatcaatgatttatttagtgattgtgccgatcatgattattggtttaggcctgatcattcgttttgctcatccgttgtttgaaaaagtttttcggacatatgatcgtttgaataacgttgttcatgaaaatctgcaagggattcgagtggttaagtcctatgttcgtgaggaatacgaagaagaaaagttcagtcgtgtttcacaaatggtatttgataattttactaaggcgcaacgaatcgtggcctttaatatgccgcttttacaagtagcagtgtatacatgtatgttactgctttcgtggttgggtgccgaattgattgtgaataaagggaatctgtctactggtgaattagtcagcatgttcaattacacgatgcagattttgatgagcttaatgatgatgtctatgacctttgtccaattaatgatcgctcgtacctctgccgaacggatcactgaagtcttgaatgaagaaagtgacctgaagaatggggaaaatccactgatggaagttccagatggttcagtagaattcaacaatgtttgcttcagctacaaggatgacatggataaactcgttttagaaaacattgatttaaggatcgcttctggtgaagtaatcgggattgtcggtggaactggtagttccaagtccagtctagtgcagctgattccacgattatatgatgtgacccatgggcagatcaaagttggcggtcatgatgtgcggagctatgacttggaaactttacgggatcaggtggggatggttctgcaaaacaatgtgttgttcagtggaacaatcactgataatttgcgctggggtaacgctaatgcgacggaagaggaagtcattcacgcagcaaagatcgctcaagccgattcctttatccaagagtttcctaataaatatgacacgatgatttctgaaggcggaaataatgtttctggtggacaaaagcaacgtttgaccattgctcgtgcattgttgaagaagccgaagattttgatcttggatgattctaccagcgcggtagatacaaaaacggatcgtgcaattcgtgaaggcctagcaaaggaaattcctggaacgaccaccttcatcatttcccaacgggtcagctcaattcaggatgccgatcgaattattgtcttagatgacggaaaaatcaatggaatcgggacccatgatgaattgctggcgaacaatgtcatctatcaagaagtctttgattctcaacagaaaggatttggtgaacatgatgaatagaggaaccgcagccaaatccagacccaccaaaaccatcaagcgcttgctgaagatcatggcaaaagaacataaagctcaattaatcattgtcttttttatgattctgatcagcgcctttgccaatgtacgaggttcgctgttcttacaggtcgtgatcgatgattatatcactccgctgattggtcaaagcaatccgaattttacaggattgttaaaggcaatcatgactatggccttaatctatgtaatcgggattgctggtaccttgtcttacaacttgatcatggtaaaagtatctgaaggtacccagaaaaaaattcgcgatcagatgtttactcatttagaaacattgccgttacgttattttgattcaaatgccgatggtgatatcatgagtcattttaccaatgacacagatactttgcggcaaatgatttcacagagtattcctaacctgatgatggctttagttacttttgtttctgtgtttatcgccatgttttcattaagtattcccttgacctgctttgtgattgtctcagtctctttgatgtttgtgatgctgcgttttatcaccaatcgcagtggccgttattttggtgagcagcagcgttcacttggtaaggtcaacggctatatcgaagagatgatgcacggccaaaaagtcgtgaaggttttcaaccatgaagagacagcgataaaggaatttgatgtgattaatgatcaattgcaggaaagtgccacgaaggccaatgcgacagcgaataccttgatgccgattatgatgaatcttttgaacatccaatatgtgcttgtagcaattattggcggtttattcgcagtttacggtgtttcagcattgactgtcgggatgattgcttccttcttgcaactgagtcgttcactcaacggcccgattagtcaaatttctcaacaaattaattttgtaattatggctctggcaggggctgaccgaatcttccaattattagatgaagaatcagaagtcgatgatggctatgtgacactggtaaacgtaaaggaagttcagggtgaattgatcgagacgaaagaacggactggaatctgggcttggaaacatccccatgaggatggaacgacttcttatgttcgtttaaccggcgatgtccgctttgaggatgttaattttggttataatgacgatcagcttgtactgcatgatatcaatttatatgcagagccgggacaaaaagtcgcctttgtaggtgcgacgggtgccggcaagacaaccattacgaatctgatcaatcgtttctatgatattcaagaaggtaagattcgttatgatggtgtcaacgttaaaaaaatcaaaaagaattctttgcgttcttctttgggaatcgttttgcaggatacccacttgtttactggaacagtcaaagaaaatattcgttacggtaatttaagtgcgacagatgaagaagtttatcaagcggcaaaattatcaaatgcggatactttcatccaacatttaccagagaaatacgacacggtgattactggtgacggtgagggtctatcgcaagggcagcggcaattgctggccatcgctcgagcggcgattgctgacccacctgtgatgattatggatgaggcgacgtctagtattgatactcggacagaaagcattgttcagtcagggatggatcgcttgatggaaggtcggacggtgtttgtaatcgctcatcgattatccacgattcaaaactctgatgtcattatggtaatggatcatggccggatcattgagcgtggagatcatgaaagtctattagctgaaggcggcatgtattatcaattgtataccgggaaagtcgaattagattaatcctacagacgtgtcttgcataaagcgagatacgtcttttttattgggggcctctttgtccctagaaaagaaatacttgaaatgatttagttggaacaattgaaagataatcgttacaatgaactaaagatttcgagaaaggaagtgctgctatgtccatgacggttttgcgattggatgtatccgatttatcggaggtcaaggaattgattaaaaaagtattcatgaggtttgaggctccagagtattctgatgaaggtgtggcacattttatgacgtacttggacgaggagctggaaaaggaaatcgtaatcgaacagctacagctttggggtacaaagatcgatcagcagcttgtcggggttctagcgattcgttcgggtaagcatgtggcgttgctctttgttgacgaagcctatcatcgtcaaggaatcgccaagaaaatgtaccaggcgatgctggcagaactttcgccgaaacaattgaccgtaaattcttccccttatgcagtgccagcttataagcggttaggctttcaacttaacggtgaggaggagacggtctcagggattcgttttcaaccaatgatttttattagagagactaactatatagagtcaagtaaaaattagccaaatcaaaaaatattttataacagataattccgaaaaaagggtacaacaaataagcttcttaccattagtttttttgaatgttcaatagctaatcagaaacaattatataaggctcgtttttagtcaaaatagcatgaatcacgtaacaaagcttacgagaaaccgcacctaaggcagttagatgatgttttccttcggaaacttttttctggtaaaacgcactaaaaacaggatcacattgagaagctactaaagccgccgaaaacaaggcttttcgcaaatatggagaccctcgtttactcataacattatgcgttgcctcatattgccctgattgtgtcacggaagcgtctatcccagcgtaagcaacgagttttttcgggttagaaaatttttgaatatctccgatctcaccaagaatagtcgcaccgtttataggaccaattccaggaattgtgagaataacagaatttaaagtgtccattatgtgcttgatttctctttccgtttcctttatttggctttcaatgaattttaattgttcaatcattgaacgtagttggaaggtgaacgcttcttgagcaaattttactccaaaggagttagaagctgcttgcttcaattggtccgctttttctgccttgattcggttcctgcttaactcagctaagtattgggccaaagtttctgaggaaatgttttctaagtcgatcggggcactaaacgccagcaataactctttagaagcttttccgaaaacgccctgcttggtaaaaatcgtcgcgtattctggaaagacttgatccaatacggctataatttttcttttgaagtcgctcgctgtacctactaaataagttcggtaacgagaaagttgtttcaaagaaaaaacattttcatcggataagaccgtttcgacaaatgagccatagcgcattaagtcagcaatcaaaacagaatcaataatatcgttttttcgtttccgtatttctgtacctttacgccatccgtctgtttgaaggggattcacaacgtgaatcaaataatctgattcgtgaaggtatgaaaagatggacagccaatagtgccccgtggcttccatccctataacaaagtcactgggtgctccggaatagtcgaccattcgctcaattaatgactctgctccttcagtggtgttaggaaatgaaaaaccttttagtaatacctttccttcctcgttcatgatagaagcaacgtgagtgcgtttaccgatatcaatgcctaaaaagtacatgtatatctgacctttcaaaaaaagaattttggattgaaatccactcaactgaaaagcgtcactaccttgtacgagatacggagtaaagtaaggactttcaacatctaactcatacgcaatccacttatcagagagaggagccagtctctcgagtgcgggttcaatgacccaaggggggaacggcttagcctctcaatccaataaatatattatctcaaaagaaatgagttaataccaaattaaaataacgatggttcatagggttatccaatcaaaaccggaaggttaaaaccctaactctaatatacaaggatgtatagagatgaaacgttttgcaatgaaggattatggaaaagcaaaagaggtattgatcgaaatcgaggcacaatcgcgtccgatggatgaaacgcatgttcgagtggaattagcggctttcgcaattaacccatatgatgtggcgctgagacaaggagctatgcgtgattttcggacgttgaagtttccttacgttttaggaaatgatggtgcgggggttgtaactgaggttggcggtgaagtcagtcatattaaagttggcgatgaagtaatcgttcatgcagtcggaggcacctatggtgaagaagtggttgtgcctggaaaaaaggtcgtgaaaaagccaaattctatgtcctgggaagttgcggcaggcgctgtaactccttggttgactgcttataacttagtgactcatttattgggtgacaaaattggtgagacggtgatggtgcagggggcttctggtgctgtggggtcattgctggttcaatttttaaaggagcagggaaagacggtcctcacttctgcctctaaacgaaatgaagcgatggtccgcagtttaggtgctgacgatttcgctgcctatgatgatacggatgccggagaagtttttgcagatcgggccgatacggtgatcgatgcgacaaaaggcggacgagcaggtgaagcaggcatgaaaatcatgaaaaccggcggtaatttcgtggcattgaatgagctgcctagtgaacaaaagaaaattgggaattatttagcttttggaccatctaaagagtattctgaccacgaggcattaacagtattcacagagctgtctgataaaatccagttgaaaattatagaagtgctgccgtttgcattagcaagtgttgtttctgctcatgaaaagctggaggggcatccatcagctggcaaaattattataaaaaaggtggattagtatggatcagcagaagtggttattagtaaaagcaaatttcgatggaacagaggatttagcagatgggtattaccgtttgagagaagttgatggtggctatcaattggcatatttggtggctggaccttgtggtgataaaaatccgcatcccgagattacattgcggcaagaaggaaatcaggttcgaccgattcgattgcgagatacagagacgtccccaattttgaacctatcagaaaaagaagatgccactgcgatcgaggaactgacagatcagcttttaaatcgctttatcaggatcaagaaacttagtatttaagcatttctttagcaattcctagttgaaaagggatacaattatgacaaattgtaaggaatgtcaaaaaaggtgatttcagagactcactagaattgaaattagccgaaattccatgctacattagttcagcgagaaaaaatagtaggtgaaatcaatgaaagttattcaatctcttaaacacacatggagtctgttcatattagattggcgtcgtattttcaaaaatccgatcgccatttttctgatggctgcattagtcgtcatcccatctctttacgcttggtttaatatcaaagctttgtgggatccttattctaacactggggaattgccgattgcggtctacagtgccgataccggagcaaaattccaagacaaggacgtcgaaatcggggacgaggttatcaagaacctgcatgagaataaacagctcggctggcgtttcgttgactcgaagaaacaagttgtcgagggtgttaagtcaggtaaatactacgcaggaatctacttaccaaaagaattttcaaaggatttattgagtttcacttctggagatattcaaaaaccgaaaatcgaatattatttgaaccagaaaatcaatgcgatcgcgcccaaaatcactgataaaggtgccggttcaatacaaacagagatcagccaagaattcattaagacagctagttcaaccttactgaaggtttttaacgagatcggctacgacattgatgcgaacctcgttagtattaacaaggttaaaaatttaattttgacgaccaacgacaatttaggcgagattgacaagtacacgcaagaagttgtcgaagtgcaaggcaaactgccggagctgaaagaaaaattagcgaaggcgaacgaaatcgaaacctatgtaccgcaagtcgatgagctaggacagaaattgatctccttgaatcaaaaaatgcctgaaatcaaacgacaagccagtgtcatcttaacgttgcaacagaaaatcccagaaatccaacaagctggaaatcagttggcacaagttgataatgattttgctgaaattgaaaaaaccatgaatgatgggattaacgaagcaaaacaaggcttgaatatcattcatcaagttcaaacgattttaccggatattcaaaagttggggaatcaagcagatgactttgctacaacgaccaaaaatggtgcggaacaattgaaatcagctgtaccaagtatttctagcagtgtgcaagtgacgttgcaggcgattggacaggtggctacaactactcaatcaattacaagtgatttatctgccctgttagataaagaagagttaacgccagatgaaaaggctcatatcgcttcgatcattaacgacttccaaaataatttatcagagcaacaaacagctatcgaaaaacttaaccagttcttagctgatttgaagaagactgctgatgataatggtaatactgaagtcagtcaaaatttggcaaccattatgagtcgattagataatctaaaaaatgctattggtgatataagcactcgttttggacatctaaatgatatagttcaaaacggtactacagatcaagcaaaagactatttaaacgagatcaatagtgctgctgtaaacgtagcgaatgtggtaaacagcatcaacgctgaacaagttggtcaaacagtcagcacgatccttgataagctaatcaatacaattactacagcgcaaggtgtcttgaatcaagctcagcaaattgattttgcgtcattattgaattcgacggaaggcaccgtcagcaatgcgattgcctttttagaaaaatatcaaaagcaaatgccggcgattggtcaagaagttcatgatgcgaacgttctattgaacggtcatatgaatgatattgtcaatggaataaatacaggtgcagacctctacaacaatgaactacctatagtagaacaaaaattaggtttggccgcaaactttatgcaaaatgactggcctggtgtgaaaaaagatttgactagcagcttgaagctggcaaatgataaaatgccagaggttgaacgggcgttgaatcttgcaacggatctgatcaaaaatgattatccaaccttgcgagcagggattcaaaaagcagcaaatgctatccaacaaggcgatcagacgattgacttcggtcaggtcttgaaattattgaagctggatgcccaaaaggaaagtgacttcttcacgactccggtagatttacagacgaatacaatgtacccaatcgccaataacggttcagctagtacaccattctacacggctttgtgtttgtgggtcggtgcggtactattctctagtgttactaccactgagtttttcttagacaaaaaagatcgcggcaaatacacgaaacgtgaacaatttggtgctcggatgttaacttatttagttgtaagtgtcggacaggccctgattgttacattaggaaatatgttcttgttaggcgtttatgtgaagaatccagtgtatagtgtcctctttgctgttttagttgctctagccttcatgatgattgtgtacgtgttggttgcgctctttggaacagtcgggaaaggaattgcgattattattctcgtgctctccatttccggtgggggcggaaactatccgatccaagtatccgggaagttctttcaagcggtcaatccatggctgccattcacccatgctgtcaatttattgcgtgagagtgctggcggaatctattggccaaatgcgtcaggcgatatcataatcatgattgttttgtttgtggtattcggtatattaggtacgtgggcatatccactcttgcagccacatttgacgaagttgacaaaagtggctcatgaaagtaaaatattccactaaaaaacaacaggtaagacaacagcgtattgctgttgttttacctgttttcgtgttttactaaatgtatgaaaagtcattgaaaaaaacattgacttttagattaaggacgagtaatatttcgcttgtttgcttttttttagaagacttttattgatagaaataataatttgcggcgtaaaaacaaacatatttttctgtaaagtaaatgagtacattatttggaacaaggagtgagtctaatggattatcttaaacgcttgctggttggtcgaccattgaagtcgtctgaaaatgatgatcaaaacttatcacgtttcgcagctttagcgatgctttcatcagatgcgttatcttctgttgcgtatgggacagaacagatcgtcgtcgttttggtaaccttgtcagcagcagcgatttggtattcattaccaattgcatttgtagtattaattttattggcttcattgattttatcttatcgtcaaattattcatgcttatcctcatggtggaggcgcttatgtcgttagtagtgagaatttgggaaagaatgccggcttgattgctgggggctcgcttctggtggattatatgttgactgttgctgtatctgtttcagctggtgctgaagctatcgcctctgcgattcctgctttgtatcatcatcgcgtcctgatttctgtcattattgttttattattgatgctgatgaatttgcgtggtttacgtgagagtgcggggttactgatggtacccgtctacagctttattgcggtgataacggtgttgatcatagtgggattagtaaaaattgtttccggagcagcaccgcttcattccatcgctcaagtcggagcaattgttccaggaatctcggtggcgttattgctgcgagctttctcttcaggttcttcttcattaactggtgtggaagcgattagtaatgcggtgccattctttaaaaaaccgcgtgccaaaaatgcagcagggacattggccatgatgggcttgattctaggcttcttctttactggcatcacatttttgaactattggtttggcattgttcctactgctgaagtgacagtcttatcccaagtgggtgaagctgtttttggcaaggggatcatgtattatgtattgcaatttgttacagccctaattttagctgtggcagccaatacgggtttctcagcatttcctgttttggcctacaatttagcgaaggataaatttctcccgcaccgctaccaagatcgcggggatcgcctaggctactcaaacggaatcattacgttagcattagggtcaatcatcttgttattaatttttcaaggttcaacggagcgcttaattcccttgtattcagtcggagtattcattccgtttaccttatcgcaaactgggatggttctgaaatggcgcaaagaaggccaacattggtttagaaaatcgattgcgaatatgattggtgctttgatttcctttgcgatcgtcttgattctatttgtttatcgtttgccggatatttggcctttcttcattattatgccaatcctgatctatgccttctataaagtacatgagcattataaaaatgtggcggaacaattacgtttggttgatgatgtggaattacatgagtatgcaggcaatacagtgatcgtacttgtagggaatgtgacgcaggtcaatattggtgcgattaattatgctcgttcgattggtgattacgtgattgcgatgcacgtttcattggaggaaaatgaagagaaagagcgcgagattcgccatgagtttcgtgagaagttcccagatgttcgcttctcagttgttcgctcaccgtatcgatctattgtgaatccagttagtcgctatgttgaccgagtaagtaaaaatgcgaaggaacataattatacgacaactgttttgattccagagtttgttccaaacagaacctggaaacgttcgttgcataatcaaacagcattgcgtttgcgtttccggctgtcctatcgcgacgatattatcattagtacgtacaattatcatttgaagaaataatttcaagagtgtgccgatattaggtacactcttgtttattttaaaaaagttcaaaaaatagaaaggataaaacgtattcatcttttttttgagcaaaaagggttgattttagttcttattagaggtaatatcaaacagcattaattactaacactattaggtattaatgagacgaaagttattttttgaaagaagggggagtatgatgacatacgcagaagatgcagaacgtgaactagtgcaactgatgtttcagaatcgtcatggtgcgtttagcaggattgaaaagagcagtaagggtgctaatatcgtcattaaagtactcgatcgattaggtgaacctacgaatccaaaacatttggctgataccttaaatctatccactgctcggatcgctgctgtactgggaaacttggaaaaacgcgggctgataagtcgcacaatggatcctaatgatcgacgacgaatcaacgtcagtttaacagagaacgggaaaaaagtggctaaggctgaaaagctggaaatgcggaataaaatcattcgagtatttgagctgatgggagaagaggacactaaaaaatatcttgaattgactgccaaatttgtcaagtactctcaaaaattaaccatggaaggggaaagtgatcaatagtgaagatttttaaatatcttggtaaatactggtacgcaattattgctgtgttcttgcttttaatcgtgcaggcatctagtgatttgagcttaccaagtttaacgtcagatatcgttgatatcggtattcaacaaggaggacttgaacagtcaacgccagaaaaaattagaaaatcaacgcttcaaggaatcgagatatttatgaccgataaagagaagcaaacaatcaaggaaaattataaagaagccacccaaacgattgatggcaagaaggttgatatttataaattagatcttcaagagggtatgacaaaagataagttagcagatatctttaatttaccgatgatgatgattgcttccactcgttcaaaggattcaagcaatgcgaaagaagcaaaagaagttatcaatgattatacagctatctcaaaggatgctgctcaggcacaggctttggggcaagaggcgaaaacccttggtgagcaagctcaatcagctggtaaagaagctgctgcggctacagacggtgcaactgccgctgcaaaaggtgcggaagctcagagattagctgctgaagcgcaagcaaaaggagaagaagctcaaaaacttggcgattctatcaaagccaaaaatgacgcgatgccagcaaaagttgaagctgcacgtaaagctactaaggaaagcctaggcgatgttggtgaagactcattgaaaacggtagggattcaactgactttggcggaatacaaagcgttagatgtgaatacaggaaaaatccagacggactatatgatcaagactggagcgaaaatgcttggtttgactttagtatctgctgttgcggcaatcattgttggtttaattgcttcattaattgctgcgactgttggtaaaaacctgcgtgttggacaatacgagcgaacattggaattttcaaataacgaaatggagaaattctcacctgcttcattgattacacgaaataccaacgatattcaacaaattcaaatgggtatcgttatgatcatgcgaatcgttttatacgcaccgatcttaggtatcggtggtgtttacagagtatacaagaccggcactggtatgggctggatcgtaggtgtggctgtagcagctgttttagttttagtcctaaccttattgctgaccacaatgcctaaatttaaggccctacaaaacttagtcgaccgtgtaaacttagtttctcgtgaaattatcactgggttaccagttattcgtgcgttctcacgtgaaaaatatgaggaagagcgtttcgatgttgctaatacgaacttgatgaagacgcaaatgttcgttaaccgtgcgatgtcattgatgatgcccattatgatgctgttgatgaatggtatttcagtcttgattgtgtgggttggtggacacaatatggacaatggtcaattacaagttggggatatgatggccttcattacttatacaatgcaaattgttatggccttcatgatgttgtcaatggtatcgattattttacctcgtgccaatgttgcagctggacgtgtagatgaagtgctgaacacggaacctacgattaaagatccagaacatccaaaagacgaccatgacttcaaaggtgaagtgaaatttgaaggtgttcaattccgttatggcgatgctgatgcagatgtcttgcatcatattaatttcactgctaaaccgggtgaaacaactgctttgatcggttcgacaggttcaggaaagtcaacgatcgtcaatttgattccgcgtctctttgacgtaactggcggacgtatcacgattgacggtatcgatattcgtgaaatgagcatgcataaattacatgagattatgggatttgtaccacaaaaaggtgtgctgttctctggcgatattgcttcaaatatcaaatttggtgatgctgatatttcagatgaacaaatgaaacgagctgctgagattgcacaagcagatgaatttatcaactcgaatgaaaaaggattcgatcggacaatttcccaaggtggaacgaatgtttctggtggacaaaagcaacggttatcaatcgctcgggcactggctaagaatccgaaaatattgatctttgatgattccttctcagctcttgataacaagacggatgttgctttgcgtaaagcattagctgagaacatcaaggatgcgactcaaattatcgtagcacaaaaaatttctacgatcttgcatgcggacaacattatcgtattagatgaaggccgtgtagtagcccaaggtcgtcatgaagaattgatggaatcatcagctgtctatcaagaaatagctcagtcacaattaagtaatgctgaactaggcatagaagaagcggattaaggaggagcgaaaagaatggcagaacaaaaacaaaatcgccctcgtggtggcggacctggccggggaatgagtgcgccagttgaaaaagcgaaagatttcaaaggtacgatcaaaaaattagtttcgtatcttggcgcttataaaatcgccgttttctttgtaatgatctttgcggcagcttcaacgatcttcaatatttggggaccaaagatcctatcaaaggcgatcacagaattatttaacggtttgatcaagaaatatcagggaactggtgatatcaactttgataaaatcggtggtatcctgctcttcatgttaggactgtatgtagttgcttccttatttgggattatccaaggctggattatgtcgacgatttcgcaaaagattacttatcggatgcggaaagagatttctgaaaaaatcaaccgcatgccaatgaattattttgaaagccgcacgactggtgaggttttatcacgaatcactaatgacgtggatactttaggacaatcattgaaccaaagtttgactcaattaattacttcgacatttaccataatcggagttatcgtgatgatgctttcaatctcagtgaagatgaccggtatcgcgatcttgatcgtgccgatctcacttctattgatcatggttgtcgtgaagaattcgcaaaagtatttcaaaacgcaacaagaatatcttggtgtgatcaatggtaaagttgaagaaacaatcggtggatacaccatcgtacgcttattcaacgaggaagaaaactcattgaaagaattcaaagaacaaaatgatattctcttcaaatcagcatggaaatctcaatttctttctggtttgatgcagccgatcatgaattttgtcggtaacttaggatatgtaggtgtggcgattgccggtggagtgatggcttataacggtacgatcactgttggggatattcaagcgtttattcaatatgtacgtaatctgacacagccgatcgcacaactagctcaagtatcaaacatgctgcaatcaatggcagcagcggcagaacgggtctttgaattcttagcagaagatgaagaagaacaaatggctgaaaatcctgttcaaattgataaggcaaaaggaatggtcgatttcgatcatgttcaatttggctatacatctgataaaatcgttattcaagactttacttcgcatgttgaacctggtcagacagttgcgattgttggtccaactggtgcaggtaaaaccacgatggttaaattattgatgcgtttttatgatgtcaactctggtgcgattaagattgatggtcacaatatcaaagatttcaatcgtgctgatttgcgtaagaacattgggatggtcttgcaggatacgtggttgttcaaagggacgatcatggacaacttgcggtacggtcgtttagatgcgaccgacgaagaagtttacgcggcagctaaagccgctcacgtggatcacttcatcaagacattgcctggtggctatgacatggaattgaacgaagaatcttccaatatctctcaagggcaaaagcaattgctgacgattgcgcgtgcgatcttagctgataagccaattttgatcttggatgaggcaacatcatctgttgatacacggacagaaggattgattcaagaagcgatgaacaatctgatgaaggggcggacgtcatttgttatcgctcaccgtctatcaacgatcaaggatgccgataagattctttatatgcaaggcggagatatcaaagaacaaggaagccatgaagaactattggctcaaaacggactttatgccgcgttgtacaactcgcaatttgaagaattatcagaataaagcaaagaccaatcatccatttatttcggatgattggtcttttttattaaaaaatagtctactagtagcgacttttgtctgtgatcatctttgtctgtgatcatctttgtttgtttatcataagtgattgtgacagagccgttggcatattcgccgtctttagtttgatcccaagtggctgtcgatcttggaggcataccatatttttctttttcccagctggtaactctatctggtgggccaactagcttttctaattcttcatagctggcaccgcccttaaaggagtatctttcgttgtcagcatcgtaatgctctgtcgcgacctttatactatcgtaaatctctgatgtccactctccaggaaacgcctcctttggtttggaggttcctggttgtgtatcgatcggttcataggaaacggtattagaaaacataaaaatgacagaaccaatgatgagtaaaatagcgaaactcagtgccagcaccttatttctaggagatttcttcggaagcgcagtttgttgctgcgctttttgtgacaaatcctttttttgtgctttcaaataaatcgttccacaataatcacatttccaaccttgttcaactttatggaaatgtgtgctaccgcaattcatacattctttacttttcatgatagagtccatccgatccgtaattttcagggaagtcatccggatatttacctaatccagcgcgagaatattgctctggtagacggttaaagtaaatgtaacgcacgattggggtaacgtatcctacctggtcatttttaaaataaacgttgggttttccctgtttttcgtaaacaaatagtttggtgaatccaccaaaagtgttatccgtgtttatggcgatgaaggcacgaacctctcgccaagtcaattctccttgctgccactgctttctaagcatctttgcttcataattgatgggattattttgttcatcaaacttaagagcaagctttttttgaatttgctcggaatctgtaacaatctcatctggctgcccccaaatccgtaaaatatctgagctggagtattgatcgaaatctggtccgtaagcggctagaaatccagcttctcgataataggtcgttatggcgaagtcgctattaggattttcgatgatcatctcttcgtttggagatgttcttagacgatttttttcaagagtatcatgttgcttttgtgcggctgatactcgttctttaaactcttccgtcttgtcgccgccgtattcttccgctgatacaagtgctaaatcaatctcctcttggttcaatgaaagctcggcgattctcacatttcgctcaggattattcaattggctaggtgaataggttgtcgaatctgtcgtgcttttagcgttggtgacaggcttaaatgtagtcaacttcgatccgctctttgaaggagttgctttcaatgaaaaggggataagaatactgctaataaaaagaatgcccacaataagaaacaaggtgatgcttataatgaaagccaactttttccgcggctgtcttttttctggaggtggtgtatcaagctcgtagactgcgtgacaatagctgcattcataaccagattccattttttcgaactgatttccaccgcaatatttacagaccaagcccttcattttcaccactcctctcattttatccgaagcccctcagacagataactttattttcgatgttaccagaacactaactgttcataaatgataccacgggataggtaacgcgaaaagagacgatgcaaagatttttggtatagctagagatttggttggagaaatatttctattaaatgaacttttgatctttattgactaatcaaaaagaagatgatattttaattatagaaaatattttctgttaaatgaacataatttcaaaaaaggagtagtgcgtatgatggatacagaaaaggtacagctggtagaatatggcaaaaaattgatttcgactggattgactgcagggactggtggaaacatcagcatgtatgaccctgaaagccagctgatggctatcacacctagtggcattgattatttcgagatgacagtagaggatattgttgtgctggatcttgaagggaaggttgttgaaggagcaaggaagccttcaagtgaatggcagatgcatttgattaattatcaacggcgaggtgatgagattcgtgcggtcgtacatgcacattcgacatttagttcgattcttgcgacttgccgcaagcctcttccagcgactaattatatgatagcgattgcaggaggcggtgatgttcgctgctctaaatatgcgacgtttgggacggagaagttggcagaatacgcctttgaagcgatggagaatcgttatgcttgttttttagcgaatcatggactgctgacatgcggtccgaatttgcacgatgctttttcggtagcaagtgagatcgaacgtttagcgggtttacatgtgggtgcttctttatttggagatccagtaatattggacgatgcagacatggccgaagtacacgagcgttttcctagttatggacaataagagaagtgtagcgaggagatgaagcgatgagtaaagtaattattgtcggagatacatttatttctgtagacacatggagacaagcggttgaaatgatgaatctgcccgagcctgtagaggtggtttctttagaatggtatccggaagattctccgaaagaatttcagcgaaagttaaaattgattgaacaaaacggtcctgaatcgctagcgattcctgaagggattctggaagaaataagtgatgccgattatttattcgttcacgtggctccagtttctcgtaagttgttgaaaaatgcgcagaatctgaaactgattggaacttgtcgtggtggggtagagcatcttgacattgggttagcgcgggaaatggggattccagttattcatgtcattcggaacgccgaaccggttgcagactataccatcggtatgatttattcagtgaccagaaatattgcgctttctcatgcggcggtgatgcagggagcgtggccgaaaaattttccgaatgatgcctatcgaacgacgcttgctagtcaaacagttggtttagttggactggggcatattgggaaaatggtggcccaacgacttgtcaatcttggagtaaaagtgatcgcctacgatccctttgttgatcaagaaaacgtacggtcatctggaattgatttaacctttgtttctttagagacattatttaagcattcagatattgtttctctgcatatgcgggtaacacctgaaacagaaaatttgatcgacgggaaattgttgtctcttatgcagcctagtgcgtatttaatcaatactgctcgtcctagtattctggttaaagcggattttattgaggttttgaagaagagaaaaattgctggagctgctattgatgttgtgtgggaggagccaatagcggcggatgatcctttactcggactggataacttggtcattacttcgcatatcgcaggggatactgtggatgcgattcctaaatcaccgcttttgttagcgaaaacggtaaaggattatcttcaaactggagttagtgaattcatcgtttaaaaagagttcctgagaattgattttctcaggaactcttttgttgtgcgccctgcatgagtgaaaacttggtggtgaaagtccactacaggcttggcagtaggaactgttagcgaaagacaaggcggcaatcgtgaggctgtggctgaaggaagtcggacgcaaactcctgaactgacgaacagaaactagatacaaggctgaattaggtcggataagtcttcatcacaagacaaagtccaatactgcccgaaacctatacagtaaatctagcagttacatgggaggaaagttttcactcttaccgggggagatctcatgagggtgttgtgggcgttgaatgaaaacaaaccagcacaacgatcatggcgacatgatggtgaatcatgagaagtcagccgaggtcatagtagtaacgacactgaccgttacgaaggactgaacaataagaatcttgaataatttaggaggtgtgagaagatgcgacgaccgcagaaaacaagaaaacttggctatcatcaaagagctagtgtggaacacgaagggtatgatgaagtgcgcagcacttcttgcggtgaacagaggaaacaagatggtgtagaaaatctgtttgggagaattctagagcggaataatctcaatcaagcgtaccttcaagtagtcagaaataagggggcggctggtgcagatgggatgaccgtcgatcaactgcttccttacttgaaagagcaccgcgaggaattactatccaatttacgccaagggaactataaacctcagcctgttttgcgagtagaaataccgaaaccaaacggcggtgtaagaaaactaggaattcctacggttatcgatcgtatgcttcaacaggcaatcaatcaagtgttacaaccgctatttgaaccagaattctcagataatagttatgggtttcgcccaaatcgcagcgcacatgacgcagtaaagaaagcaaaatcttattatgaacaaggttaccgatatgtggtggacattgatatgaaagcctactttgacaccgtaaatcacgataagctgatgtatttcgttgagcggaaagtaaaggacaaacaagtcctaaaactgatccgtcaatacttaatgagtggtgtaatggaaaatggactcatcacaacaacggaagaaggaacgcctcaaggaggcaatctctctcccttgttaagtaacatctacctgaacgaatttgatcaagtgctagaaaatctaggacataaatttgttcgatacgccgatgactgtgcgccatgaaagtgtgcgtgaatagataaactattcaaagcagctatgctgtatagatgatggcagacggcctgccgaaaccgccatacaggtggaggtttcaaaccaccttaaggtgctgtagtcaaaagctatggtattgagcgttaaggaaaaggcaaccaagagttgtcaggtgtgtgttatggagatgagtgaccatacgaaccacccacagaagtgtcgaaagcgtataaattccgtcaaaactgggtatagtcgttgacctaggatgagcttggaggaaacctgtttactgatcaggcggcgggcggcataaaggtggcatgaacataacataggcgtctatatggaacgtgggaacccacgggctgatgtcaagggagtatttcaagcggaagccccgcaagaaaagagtaccgatgcagtcatgggggcagattgggttgtagtagtgaagaagctcttgtaacgagagtggagcgaagaacctgagttatccagtttcaaggataagtcaactttaaggaggaggaacttatgcaagaaacaaagtcatacaatatttcaaaacaagcagtttaccaagcatttctaaaagtaaaagccaataaaggaacttttggagtagatgaagaatcaattgaggcttatgaatataagctgaaagataatctatacaaactgtggaatcgattatcatcgggaagttatttcccaaaaccggtaaaggcagtatccattcctaaaaagagtggtgggctgagagtacttgggattccaacagttgaagataggattgcacagatggtagcgaagatgtattttgaacctgtagtagaacgattgttttatgaggattcttatggctatcggccgaataagtcggcaatccaggcaatagagaaaacaagagttagatgctggaaaagagattgggtactggaatttgatattaaaggactatttgacaatatcagacatgactatctaattgaaatggtaaaaaggtacactcaagagaagtggattatcctatatgtggaaagatggttaaaagcacctttccagagggaagatggttcgactgtttcgagaaaagccgggacaccgcaaggtggtgtaatcagtccagttctagcgaacttgtttcttcattatacgtttgatgacttcatggaaaaagaatttcctaatatacagtgggctagatatgccgatgatggtattactcattgtgtatccctaaagcaagcgaaatatctgaagaaaagattggaagaacggtttagaatctttggtttggagttacatcctgataagacaaagattgtttactgcagagatagtgataggatggggaactatccgataacgacattcgatttcctgggctttacgtttagacctagaggcgccaagaataaatatggaaaatgcttcacaaattttcttccggctgtatcagataaagcgaaaaaggcgattcgcaaagaggtaaggaattggcgattacaattaaaagcggacaaaaagctagaggatttagcgaatatgttcaatagtaaaattcaaggatggatgaactattacatgaaattctataaatcagaaatgtacagtctactgcgctacatcaaccaatgtctcgtgaagtgggttcgtcgtaaatataaaaagcgacaagcacgaagaaaagcggaacattggttaggggaaatcgccaagcgagaaagaaatttattcgcgcattggaaaattggaatattaccatcggctggataatgggagccggatgagctgagaggttcacgtccggttctgagagggcctaagggggaggttcccttgggctacttactgcaatatctatgttagaagcaaacgagcaggacagcgtgtgatgaagaaatccattcaatttctcgaagaacaactaaagttgacggtaaatcgagaaaagagtgcggtaggaagcccattgaaacgaaagtttcttggattctgcattctgccaacaaagaaaggtattaaaattcgccctcacacaaaagcaaaacagcgtgtgaaaagcaagctcaaacaactcactaaaagaaaccgtggaagaagtatccaacttattttaaaagaaatcaagcaactaatgactggttggatcaactactatggaattggtgagatgaaagaattcatgagggagttaaacggttggttgaagcgaagaatcagacaatatatttggaaacaatggaagaatccaagaaccaaaagaaaaaatctgattcgtttagggatcgataaagcgaaagcgtatgaatggtcaaatacaagaaaaggtatttggtcaatctccaaaagtcatattcttcatcgatcattaacagacaaagaactggcccgccaaggatatgaggacatctccttgaagtaccagttcgtacactcaacttattgaaccgccgtatacgggtccgtacgtacggtggtgtgagagactaactatatagagtcaagtaaaaattagccaaatcaaaaaatattttataacagataattccgaaaaaagggtacaacaaataagcttcttaccattagtttttttgaatgttcaatagctaatcagaaacaattatataaggctcgtttttagtcaaaatagcatgaatcacgtaacaaagcttacgagaaaccgcacctaaggcagttagatgatgttttccttcggaaacttttttctggtaaaacgcactaaaaacaggatcacattgagaagctactaaagccgccgaaaacaaggcttttcgcaaatatggagaccctcgtttactcataacattatgcgttgcctcatattgccctgattgtgtcacggaagcgtctatcccagcgtaagcaacgagttttttcgggttagaaaatttttgaatatctccgatctcaccaagaatagtcgcaccgtttataggaccaattccaggaattgtgagaataacagaatttaaagtgtccattatgtgcttgatttctctttccgtttcctttatttggctttcaatgaattttaattgttcaatcattgaacgtagttggaaggtgaacgcttcttgagcaaattttactccaaaggagttagaagctgcttgcttcaattggtccgctttttctgccttgattcggttcctgcttaactcagctaagtattgggccaaagtttctgaggaaatgttttctaagtcgatcggggcactaaacgccagcaataactctttagaagcttttccgaaaacgccctgcttggtaaaaatcgtcgcgtattctggaaagacttgatccaatacggctataatttttcttttgaagtcgctcgctgtacctactaaataagttcggtaacgagaaagttgtttcaaagaaaaaacattttcatcggataagaccgtttcgacaaatgagccatagcgcattaagtcagcaatcaaaacagaatcaataatatcgttttttcgtttccgtatttctgtacctttacgccatccgtctgtttgaaggggattcacaacgtgaatcaaataatctgattcgtgaaggtatgaaaagatggacagccaatagtgccccgtggcttccatccctataacaaagtcactgggtgctccggaatagtcgaccattcgctcaattaatgactctgctccttcagtggtgttaggaaatgaaaaaccttttagtaatacctttccttcctcgttcatgatagaagcaacgtgagtgcgtttaccgatatcaatgcctaaaaagtacatgtatatctgacctttcaaaaaaagaattttggattgaaatccactcaactgaaaagcgtcactaccttgtacgagatacggagtaaagtaaggactttcaacatctaactcatacgcaatccacttatcagagagaggagccagtctctcgagtgcgggttcaatgacccaaggggggaacggcttagcctctcaatccaataaatatattatctcaaaagaaatgagttaataccaaattaaaataacgatggttcatagggttatccaatcaaaaccggaaggttaaaaccctaactctaatatacaaggggcggaaggtcagttggctttcccctctactcgatttatacgcgatcgtagtcttctaaacgaatttcttctagctcatcctcattgaagtcgagttctttgtctaggattttttcaacagctcggattaatgaagcggcatctaacccgtattttttcaacaaataaggtttcgaagcgccgtgcgtccattcatcgttgattccaaccttgattaattgcttatgcagctgatgctctagcattacttcgccgactgcggtacctaaaccgccgatggtgacatgattttccatggtaacaacaccgtgttttactttcttgattgaatcaactactaatgggtcagtgaaaggtttgagtgtcgtaacatgaacatgttggactgaaacaccttttttctcaagccactgagtcgcccgcattgcttcttcggtacagatactgctagagaacaaagcgacatcatcgccttctgagatgacacgacccttattgaactctgttggtttgtcaggtgagaagagacgcggcatttggcctcgcagcattctgacatagattggtccattgacttctttacaaatattcaatgctgattcaacgtctgtcgcatcaccgcagtcaaaaatcgtcatgtttgggattgttcgcaggataccgacatcttcgattgattggtgagtaacaccgccgggagtagtgatcccaggtacgaagcctaaaagggaaacgggcaggttcggataagcaatcgacatttctagttgatccagcggtctgcgataaagaaagactgcaaatgtgtgtaagaaggggcggaagccttcacgagctaaaccagctgcccagcttaacatgttttgttccgcaatccccattgataaatatttttcaggaaagacctttggaaactctttgacttcacaggaggtacctaagtcagcagataagactaacacatcctcattttcttgtgcgaatttaatcatattttttgaatgtacatccgattcgattttcatagtaaaactccttccttttttcttacatttcgttatagaatttcgtatatttatcgaattcttcgccttcttttaaacgaacgaaatgcaggatcggtcttctttcgtttaagtacggaatcccttgcgttggatcggtatagcaaagaatcactaacggcttgttcttttctccctgtttggcagcttcttcaatcgcttcaatatcatgtccattaaccgaaacagccttggcgccaaatgcagtgaagcgatcctctagaggttcaatattcattactttttttgtttcgccttcgacttgttgtccgttgatatccacgattaaaaccaaattgtccaattgatagaagaccgccgcttgaattgcttcccacaattgtccttcttccatttcgccatcagacatcataacgaagacacggccttcttcatcacgtaatttccgggcatgagctgtcccgcctgcaacgctgattgcttggtctagtgttccggcagcgttttcaaaaccgggtgtgtgatttgcaccaatcatttccattgaatagccgtcacgattgaacatttctaatgcggcttcatctaaacgatctgcttctatcaatgctgcatatacaggtgctgcataatgtgccggtgagataaagaatcgatcataaggtgcttttaatgatccgtgatattcagccccttgaatgtaatccatattgtccttcgacggtgttcctggaaattttccaggtaaacgaggtgctttgctttcgcttaagttcaatacacgtaagtaaagagtcgcgaaaagctctgctgatgaacaagcttgtgagaggtagcagccgtttctttcaagtgtcaattttagaacatgtttgcgaatgttttttgccgctttttctacatcagcgaccgtataatgatttgccatgataaaactcctttttcgtattaatgtatttaattcctttatttttgtccgtaattattttggtagaagtcatatacttcggcagtataggaatcttctaatggtttgagtgaggtgtttaaagttctggcgtaatagacgctttgagccgtttcttctaggataaccgcattttttagtgaatttgtcgcagactttccaacagtaaagacaccatggtttttcagtagaattgcgggacaattggtttcttggtaacaacgaacaatctcggctccaatggctttctcgccgacagcagcgatttctgacaacggaatctctttgccaaaaacggcagcagaagtagttgtatatataggtagtgattctccggcaatcgaaaaagctgtcgcataaggggaatgtgtatgtgtaatacctaatacttcaggacaatggttgtagacatataaatgagattctgtatcgacagaaggagtcagatcaccttcaatgatattgcccttcaaatctacgacaatcatgctctctggtgttaagtcatcaaaatgaatgccgctgggtttgatgaccacatattctgtttcgggatcttttgcgctgacgtttccgctcgtccataaaaccaacccatttttaggaagcgctttattatccttgcataccgtttcttttaattgttccagcatagtataacctccaatgttgttttttacattatttcattataaagaacaaaagtcaataaggtttttcggctcgtttttattaatctacgtatatttgcatggtttattatatgtaatcgttttcaagaaaagtgttgacaatgataaaatgtcatgcgatacttttcataagttctattaagtgaaaaaaagttcataaagggaggaattattgtggagttgttacaaaatatcttaagttcatttggagcggcggttgttgtaccagtaatgctattcattgtggcattatttttgaaggtaaaacctaaaaaagcctttcagtctgctttgaatgctgggatcggattgacagggttcaatttgatcgtgaattcatttgtaccaattgttactccggtcatcaacaacatggtcgagcaaacgggtgtaaagctgccggtatttgacacaggctggcaggcgacttcggtcattgcgtattcgacgcaagtcggagtagttttcttagtagtaggtttggttctgcaagtggcattattcttattaagatggaccgatgtatttatgccaagtgatatgtggaataactattctttcatggtttggggctcgatgatttatttgatcaccagtaacatggcgttggcaatggcttgcatgatcgtacagaatttatatgtcatgctactaggtgaggtaattgcgaaacgttgggcgaattactataatttaccaggaacaaccttgactgcaccgcaccatgttacttcagtgccgtatgcaatcatcatgaattggattttagacaaattaggtgctggtaaaattaattgggaccctgcaacgctgaaaaagaaattaggcttcttaggagaaccgattactttaggattatttcttggtctgctgatcggaatcatgggaaatttaaacaatttaacgagcttagatggttggggcagtgttttcacaatgggactagcagtatcagctgttatggcaatcttcccacgcgttgcgagtatttttgcttcagcatttactagtttgacaaatgccagtaagaaaacggcaaaaggcagcggtaagaatcgtgaatggatgctctctgttaacgacgcagttggttatggtgagcctgcgaccttgatgacgggactgattctaattccgatcatggtattattggcgatgatcttgccaggaaacgaaactttgccgttagttgatttaatcgcattgccttacatggtagaaatgattatttgtgtatcaaagggaaatattttcaaaggcgtgatctcgggcattatttggtttacaatcggtttgtatgtatgtacgttaacggctccatattttactgaagttgctgcacaagttggtgtaaatattccagaaggagccatgatgatcaccagcttcggaattttatataatcctgtaatggccttgatcttcttagcatttttatcaggaaactttttgtggatgggaattgttattgtaatttacttcgcaatgtatatcttattcaagaaaaacaagcaagcagtttggagcttcttggaaggtgaaaattcagatacgccaaaagaaaaggtggttgcatgaaggcgttagttaaaacagaacctggttataacaaaatggaattattagagattgagaaacctgtgcctaaagatcgggaagtcttagtcaaagtcatttacacggggatttgcggaacagatatccatgggtttaaaggtgagtatgatcgtttaaaaacgccactagttttaggacacgaattttctggtgtagtagaagcgattggaaaaaatgtcacgaaagttcaaaaaggggcattcgtcactagtgaaacaacctttgatacctgtggagaatgtgaatcttgtcaaaataaagaatataatctttgcttgcatcgcaaaggcataggcagccaagtgaacggcagctttgccgagtatgtgttgactcgtgaggaaagtattcatgttttggatgaaaaaatcagtttattggcagcttcgattactgaaccgattgcttgcggagttcatgccagcttggaaaaggctcaagttaaaaaggatgaagtagcagtcattgtcggtcctggtccaattgggttatgcttaagtcaagtgttgaaaagtgtggaggctaaagtaatcgttgtagggattacccaagatgccgagcggttgaagacagctaaagaattaggtgctgatcgagtgattgattcgctgacagaagatgcaacagcgattatcaaagagttcaccaacgataagggtgcggattattgttttgagtgttctggagcggcaccggcgataaaagcgatttttgattatttaaagcaaaagggcaccttagtacaaatgggcgtttttggcaaaaatttaaatgaattggatatgaattcgattgtacagcgtgagatgaatattatcggctcgcgttcgcaaaagccttccacttggcatttgaccttagacctgatgaaacagggaaaaatcgacgcggaacgcttgatcacaaaaatttacccattggagcaatgggaagaagcaattaaacaagtgatggctggcaatgaaatcaaagttgttctgcagccgaataaacaataaaagtctaatggtgataagtcaagatgaaatttgagattatttttattgaatagactattttgaagcgcactgaactaaacccgactaaaatcaatttttttcgggcgtttcaaggatttgcgtcaataacaaattgttatttatctatcacgctccttggtggcgtgtagagttgatggttacgtagtagcgtatccaccaaacgcgtaaattttcttgcggttaagacgagtgctcgtttgtgttggtgtttaggtacctctttatacttgctttgataaaaagctttatattcaggaagataattttttactgagttggcagcttcaactaagtaataacgaaaatatcgattcccttgcttggtcagaggtgtattttgagactgatagtttccagattgtttaactttccaacttaatccagcgtacttcgccaattttgtttgatcttcaaatcgttcgatttgaccaatttcagcgatcaaaccagcagcgtagacttttccaattcctggaatactggttaaacattgatattctggaatgactataactaattgttcaattgctttatccagctctttgatattcttttcaagagcccgcatttcacaaacaagaacgcccagaacaatatcaatagattcttgggctacagtgcctaagcgatagcttgatctgatggctcgttgaatagccttggcaattttctcgggttgtttgaaacgacctcttcctttttcttggattaagtcactgaaagcttccaaaggaagctcagccagttcatctaacgtgaagtcttctgtcattagagaaatcactgtagcactaaaaagactagtagattcgtctttcatttcacgaacaagtgtgttgcatttgtacgttagattttcaagaaagtgttgctttgtacgagttagttgcttaattaattgataacgagttcgggtcagacgctgtaacgccatgtatttttcttctttaataggagacgtggtaaaacgttgaatgcgtagaaagtcagcaattcttagcgcgtcattacgatctgttttgtcttcatcaaacatgcgtctaaattgtttaattcgaaaaggattttcgatagttacaagcgtattgagcttttttagttcctcgtcttcatgaaaaaacattgaaggatggaaactgtacatggacgttgattccatgccaattataatttgatcaaataggtaattctcattgaactcaagaatcatttctcgtgttaatgaagcaccttcaatgtcattggagactgagatttcagacaatgtagacaactgatcgtcgtcagttaggaaacagacatctaacttttcagaactaacgtcaataccgacaaataatttcatggaagaaggacctcctttcgatctaaattttggaaaatgcttcgatactgtgggatttcccagaagctcactgtgtaaccacaacctcgcctaatagaatacggtgataaaagagctagaagctgccttccaaactactatctgaaagtctagtccattatcgaaacagctaatgagttggtagtgataacagtggttcgggtaacagactttgcaaggtagacaaagctacaggagggcatagcaaattcccgttggatcctttccatgaatccattgtactctgagaaatcacacaataacgaaacaaattccgcaaggaatgtgttattcaataaatttttcgattcagaagcattttgattaaaaagtattagacaaaaactattttacgaggaaacagacatctaacttttcagaactaacgtcaataccgacaaataatttcatggaagaaggacctcctttcgatctaaattttggaaaatgcttcgatactgtgggatttcccagaagctcactgtgtaaccacaacctcgcctaatagaatacggtgataaaagagctagaagctgccttccaaactactatctgaaagtctagtccattatcgaaacagctaatgagttggtagtgataacagtggttcgggtaacagactttgcaaggtagacaaagctacaggagggcatagcaaattcccgttggatcctttccatgaatccattgtactctgagaaatcacacaataacgaaacaaattccgcaaggaatgtgttattcaataaatttttcgattcagaagcattttgattaaaaagtattagacaaaaactattttacgaggagggtttgcgatggaagaaaagaatcttgttgaaaaaaattgtattttacttgatcaggatgttcattcatttaaagaggtcattcagttgatcggtgctgaatttgaaaaggcggaaatagttaaaccgtcttatgtggaagcagtcgtggctagagaaaaagtttttccaactgggctagcagcagatggacacaacatcgcgattcctcatacagatccggagcatgtcttgcggccgggtatgggtgtcgtcgtaaccaaagaaccgattgaagtatcgatgatgggcagtcctgatattaaactgcaaagtaaaatatttttcccgttggcgatggagcatccgaaaaagcagttggatttactgcgacaattaatgaacgtttttaagaccaaagaagatcttgatacaatcagctctgcgacaacaccggaagaggttttagcagtgactagcaaaattaaattctaaaaaactccattttatgaaagcgttatactataatggataaaagggcttatcagagtgtgaacatgaaaactacttaaattggaggttttgagatgaccgaaatcaaaatattatctgtatgtggatctggtacggttagttctgccatggtgggggaacgaatcgtggagttactagaggaacacggttatgaagtagaaattcaggaagtaaatccaggaatggtcaaaggagcagttgctaataatgatattgatttaattgcctttaccagcccaattgatcctgccgatgctgaagggattccgcaaatcaattctgtgggattactgactggattggacgaagaaacatttttagatgcagcattagccgccttaaaagaaatgggaaaataatatgtcaaaaggctggataaagtgtccagcctttttttgaaaggagattcggatggtattagttgctttagatcttgatggaacagcgctggattcgaatggcaggctgtcacaaagtgttgcagaagcaattcgccagagagctaaaagtaaaaagtacatattcgccttttgttctggacgtccgctttcaggagtgctgcctcatgctcaagcagtgggaatagcagagaattatcatgttatcgctaatggtgctctggttcaaaatggtgctggtgatagactggttgaggagcttctggatttttcggcgtatcaagaactgacaaattactgttgtgaaaatggcttgacctgtattgcggttaatgatcgtggagcaatcacagcttttccttcgataaatctcgggacactggaattttgttttttgacaaataatctgctgaggttttgtccaataagcgaaagtgagccgactgaaaaatattccaaattgcttatttgcgataaccccgatataataaaacagaacaaaagtcgagtagaacagcgtttttcaaaacactatacctgtgtggaaggctatccgacgatgatcgagtttggtaagaaaaatgtcagtaaaggcagctctttaactaaactggcagcttattatggactttcggacagcgaggtctttgtcgtgggggataatgacaacgatctttcttcttttgaacgcttttcgcaatcaatcgcgatgggaaatgcaacgagtgaattaaaacaggcagccaactggcattgtccgacgaatgatgaagacggtgtagtcacggctttgaaaatgattgacaactttattacataattataggatgctgatccagtatttgaactaggaggataatatggcgaatgatatttctacattattaaaagtagcagaaatgtattatttagataggatgaatcaaaacgatattgcgaaaataattggggtatcacgtccatccatttctagaatgctggaggaagcacgagagaagcagatcgttaaaatcacgatcgaagcgccttttgaacgtaacaatgcgttaatgacgaaattaaaagaaaagttcgatcttttggaggttattgttgtaaaaagcttgggagattatgaattcaatctcgacaatgtaggtaaagcttcagctgattatatcaacggagttttagcggatgacaagcttttagggatttcgtgggggagaaccgttgaaaaaatggttaaacacttcccagatcatgagctgaaaaatgtccatgtggtccagctgactggaagcttagggccgaaccgaacagtgatggatggcaacgagttagtttttcgcttggctcaaaaattagatggtcgccatgaattcttcaatgcaccagcgtttgtcaactcccgtaagctgcaggaagaactgctggctcagccgcaaattgatttgaatatttcgctgggacgcaagattgatgtggcttttagcggaatcggaaatatcgaaacgacgcggaatacgctcgtctcttcagggatcttagataatcgtgatttgaatgatttactcgctgaaggagctgtgggaacaatgattggtcgggcctttgatgtcgaaggaaaagaaattcaataccgtaatcagttcccgatttctagtggtctagattcacttcgactatccccaatcagcattggtgcagtctgctcaaaaaaacgagcaacagcaacccttggtgcaatcaatggtaaattaatcaatgttttgatttgtgatgaggaagtcggttatgaattgttgaatagttaatttagttgtactgagtttatagaatagcaaatatcctcttccttttttaaaggaagaggatatttgtgttttggagaatttgctaaataaaagctttacaaccgataaatgtgtctgctggatttgtttacgatggtaatatcacctttgtcataacgatgtcgtgtttgagagtattcaaagggctgatcgttttccagatacaccgtttgttcgatttctaagacagggtcgtctggctgacagtgaaggtattcaatgtcatattgatcaggtttgtctgctttgattctacgatgcgattgaccaaattttaaatgcaagccctcttggatatactgatagatcgagctctttaaaatttcttcactgattcctggaattagtaagacaggcatcaccgtgtattcaatcgctaagggctcgtcgtctagcatacgaagtcgaataatatcatagattggatcatttttaccgatcttcagtttttcttgatccttttcactggggaaggtcacaccaaaggaaataattttactgtttagatttcctaggtgccccagtttttttgtcatgccaccataaatactagcgtcataatcatagaccgattcaggtccctttacataagaacctgatccttgtcgtccttcgattaatccctcgatttgtaggcttttcaacgctttttggattgttacgcggcttgtggtgtaaagcttcgctaattctgcttgattcggtaatctagagttttttgggtaaacaccatcgataatctgctttcttaggtctactgcgatgtcttgataaaacgccatttttcttctcccttaatgttgaaaagtaagttgataagcctgaggtttacaaatttttcagaaaaagatacttgaatttacaaatttttataactgtattagattggcaatgtaatcgattactaaaaagattgatgttccgattttatcatgattttttataagttgtaaaaagagtatagcatagttgaaaactaaaaaagtaagaatcaattacgaggaggagtattatggaaaacggctttatgggaaaacttacggaagttcttggtaactttgcgacgaaggtcaattcatttcgttacatcatggtaatcaagaatgcttttgcttccttaatcccagttatcattaccggagcgtttgggaccttgttctcagcgatggtatttgacaatgaaaatggtttagcgagaatcaaggcgctgagctttttagcagaattgaaaccgatatcatcagctgtaagttatgttactttgagttttctaacgatttacgcagtttttctgatcggtatcgagttggccaggttgaacaacgtgaaaggcatttttccgggaattgtcgcggtgatgagctatctatcagtcaatccttttgtctatgaatatgtaaatgctgataatatcactgtcatagctgaaaatgttctagcgaaacaatatacagatacgaaaggattattcctcgggatgtttgtggtgattgcttcgattgagctgtattgttggctaggacgccaagaacgtttgaagttaaaaatgccagatactgttcccaccaatgtatcagaaagcttctcagctttatttccaaccatattaacggtagctatcattgcaactgcgggttttgtaataaaagcggtgacgggaatgtacgcgtatgacattatttacaatattgtacagcgaccgctcgaagggatcgttcaaggcctgccaggaatcctactgcttatgtttatcgcgcaggtgttctgggtcatcggaatccatggaaaccagatggtaaagcctgtgcgtgaaccgttactgttggctgccatcgctgtgaataccgaagcctttgaagcaggaaaagaaatccctaatattatcacaatgcctttttgggatatgtatatgagcatgggcggttcaggggttacgatcggtttattgatcgcaattttactcgttagtaaacgagacgatatgcgagaaatcaccaaattatccttggctcccggaattttcaatatcaatgagccggtaattttcggaatgccaatcatgcttaacccgattttagcaatcccatttattgcgaccccattgatcaccgggacgatcggttatatagcgacatcacttggttttgcggcaaaagcggtggtgatggtcccttggccgatgccgccgatcgtgaatgcttatcttgcgacagcaggtgatattggtgcagtggttactcaaattatttgtattatcgtatccatcttgatctatttaccgtttgttaaagtttcgaacaaagcagcaataaaaaatgcgtaaaactactatgaactaggaggtaactaatggaaatttcaattccgaaagattttataattggagcagcagcatcagcttggcaaacagagggctggaaaggtaaaaaagcaggtcaagactcttttatcgacagctggtataaaaacgaaagatttgtttggcacgaaggatacggtccagccgtggcgacgaatttcatggaaaattatgagaaagatatcgcgctgatgaaggagattcatttgactcattatcgaacctccatcaattgggcacgcttttttacagactacgaaaagttgatcgtagacgaggagtatgccgcacacattgatgagatcattgataggcagatcgaagcaggtgtagagccgatgatctgtttagagcattacgaggtgccttcatatttgctggatacctatgatggttggtcttctaaacacgtccttgaactatatgtgcaatacgcgcagattgcttttgagcgatatggtgatcgcgtgaaaaattggttcacttttaatgaaccgattgtcgttcaaactagatgctatttggatgctgcgcgctggccacatgaacaaaacacaaaaaaatggatgctatggaattatcataaggccttagcaacagccagagtcgttgaaagctatcatcggacacaagatgacggacggatcggctgcattttgaatcctgaaatggtctatcctcgatcaagttcagttgaagatgttcaggcagcgaagatgtatgatctattctttaatcgtgtgttctttgatcccatgattaacggcgaatattctgaagagctgattcaagtatgtaaaaaacatgagatttattttgatccgacaaacgaagaacttgaggttatcaaaaacaatcctgttgattttcttggaatcaatcagtattatccaaagcgcgtccgtgcaccaagatatgcttggaatgaccaaacacccttccacccagaatcctattatgaaagctttgatcttcctggaagacgaatgaatacctctcgcggctgggaaatctacccagagattatgtatgatatgtcgatgtatctaaaagataattatcgcccaattccatggttgatcacagaaaatggaatgggacgtgaacaagaggaattatataaaaatgaggatgggattgttcaggatgattatcgtattgaattcatctcgcaacatctctaccatttattgcgaggagttaaagatggctcaacctgtgaggggtatatgctttgggcctttactgattgtgtttcacctatgaatgcttttaaaaatcgctatgggttggttcgcattgagttggataaacaacgtacgcgatcattgaagaaatctgcctattggtatcgttcattagtggatgatcggaagcttattgttgaggatgaaaaagattttaaatagaaaaatgctctccaatcatttgtataaatggttggagagcatttgttttacggcttatttacttgtccttgtagctgggtcgagtttgcgttcgacgatactcaaaatccagtcggtcatgattgccattaaagcagttggtaaagctcccgctaaaatgatggcggttccgtctgttgcattggttccgcgaataataatatcacctaaaccaccagctccaacaaagacaccgatggcagtaattccgatcgctacgactagtgcgtttcgaataccggccataatcaccgaaacagataatggaagctcaatcatatatagccgctgccaattggtcattcccatgccggttccaacatccaatgcatttttatcgacttgacgcatgccagtataggtgtttttgatgatcggcagcagcgagtacaagaacacggtcaaaattacgacgttaactccaagccccattccaatcattaaaacggaaatcatcgctaaagaagggatggtttggataacattggctaaacgaattacccagtttgctaattttgtatgacgagcaatgaaaatccccagaggaatccccacgatcgccgcaaaaatcaccccgtaaatcgaaatcagaaagtggcgtataaattgggcaaaaataatactgccattcgtttgataatattgaatgaattgttgaaatgtatttagattttgcattacgctcacttcccttcgaaatagttatgttcttttagaaaatcttctgcaacgatttgtggttccacaaggtcattgtccgctcggtaattaagtctttgcatttcttcagtagagatttttcccgctaaacgttccaacgcgtctttgaccttgggatcagttttcaataatttatttgaaacgatcggtgctgcgtcataaggtgggaagaatcgcaagtcatcttctagcattacaaggtcatagctggcgattcgtccatctgttgaatagccaagaacgatatccatttttttcgcggacaacgcatcatagacgaggctgacctgcataggcaaaatggaagaaaactcaaaaccgtaggcttgtttaaagccctcgtagccatcaccttttcgcgtgatccaagaagtatctactccagcttttaattctcctgcaacgcgttttaaatcactaacctttttcaggttgtatttttctgctgtgtcttttcgaactaagaatacatacgtattgtcaaaaccataagaagggagccaggtttgatcaaaacgcttctcaaattcatcatggacgatagtaaaggcttttttaggatctttttctgcaggtaactgcaggatggaagataaatccgttcctgtatatcgtgcggatgagatggaagcatcgtctttcaacatcgcttggtgattgatcatattggtggctaagttattgatcactgtcgttttcttgtcagtataatgttcaaccattccagcagtgatacttccaagtatctgcatttctgaggtgattcccccagtaacagcgatagtatcttcgtcatcgttggaggctagaccaggaaaggaacagctgcttaggaacaatagagaaagtcccagtaaaacgaaaatctttatttttttcatggattaatcctccttccttagtgctgccggagtcatccgatcttccaataaacctagaagctgatcgatgatcaatgccattaaaataacagggacagtacctgcgataatcaaaggaggttgaaagttgtttagtccactgaaaataaggtcacctaggccgcctgcgccaatataagaagcgagtgtggcccatgcgattacatagacagctgctaaacgaattcctgccatgatcgtaggaatcgctataggcaattccactgtaaagatcgattgcaggttggtcattcccattccttttgcaacgtcccgataattacgatcaacatttttcatcccgataaaggtgtttcgcaaaatcggcaaaagcgaataaataaacagtgcgataatcgccggaaatttccctacaccgaaaaaagggatcatcaatgctaacaaggcaagtgaaggaatggtttgtaaaacgctggcgatcccgatcactaaattagaaatttttggcaaacgggtcaatacgatccctaaaggaacagctacgagaattcctaggcctaaagcaatggctgaaatatataaatgttcagcgctttttgtcagcatttgtccaccatattcattgatgaatgcttgcataattacgcctcctcactgctgatgttttcagccgcatctccgaaagtatcttcctcgccccaaagaacatcatagataatatccacaagagaaactcttgttaagatccccacaagatgattgccttcatctacaacaggcacatattttacgccacgttttagaatacgttgtaggctatctcgcaccaaagccgcttctttaacatagaatacctttggattaatgatatcaccgatgcttgttgcttttcctcggcggcgttcgcggtcgattgtttcaacgtcaacgaagcccttcaggacattttcctcatcaacgaccaataaggtatctacccgtttttctcgcatcagacgaatcgcattttgcaaacttttttctggcgtgatagaaatagctgtgtgcatcatgatctcaccaactgttgtggtatctggttttgcttgcaataagcggtcttcacctaataattcttcaacaaactcattggctggattttgcaaaatattttctggtgtatcaaactgaatgacttttccgttatccataatggcgatccggttcgataattttaacgcttcatccatatcgtgagtaacgaagacgatcgttttacctaaccgttcttgcaaatcctttacaagatcctgcaaagaatcacgagtaatcggatctaaggctccgaaaggttcatccattaaaatgacatcctgatcagctgcaagcgcacgaacaaccccgattcgctgctgttgtccaccagataattcgtgtggataacgatctagcatatctcgtggtaattctactaggtcaatcattttctctgctgtcttgttttgctcttccttgtcgactttcaatagtcgttgtacaagagtaatgttgtcacgaatcgtcatatgcggcatcaaaccaatattttgaataacatagccaatttggcgtcgtaattcaacgggatttttcttttggatatcctccccgttaatccgaatcgttcccttggttggatcaatcatacgattgatcattcgcatggttgttgtttttccgctcccactagtcccaatcaaacaaataaattcacccttattaaaagaaaggttgacgtcttccactgctactttgtttccattataaattttagaaacgtggtcaaattcaatcatcttctgtgctcctttttaatcgttggaaatcttccaattttttctttttttacgatcgatatattttgttagaactcaagtgagaactgcaaaaagtatcaattgaatgtaaaaaaatgaacatagttatgattttagtatgcaacaagaagcgtttaaaaacaaatagaccgcttctttttggtcaaaaagaagcaatttgaaccgatttcactgaaagaagaataacatttttagaatgtttttttcgagtactttgactcttcgcaacgtttagcagaactcataaaaaacatttttctggaccttaagaaaaattttgacaaatttgctctttttttctattggtatcgtgagaaagaaaacagcacagtgcttttcaataggattgacccatgatagaatagcggaggaaaagaggagaagctatgttaaccactgaagattttgattttgatttaccagaagaattaattgcccagacccctctagaaaaacgcgacagctcgcgtctattagtgttagatcgagaatctggccaaatcgaggataagcattttgatgaaattattgaagagttgaatccaggagatgccttagtgatgaatgatacacgggtattgcctgctcgtttatatggcgaaaagcctgaaacgggaggacacttggaagtattattgctgaacaacacccaaggagacgaatgggaaactctgatcaagccagcgcgtcgtgcgaaagtcggcactcagattgttttcggagatggccgtttacgggcacaagtgaagcaagaattagagcacggtgggagaattgttgagttttcctatgaaggaatctttttagaaaacttggagtctcttggtgaaatgccactgccaccatatatcaaagaacgtttggaagatccagagcgttaccaaaccgtatacgcaaaggaaaacggctctgctgcagcgccaacagctggattgcacttcacgccagaattgctggaaaaaatcgctgctaaaggtgtgaatttggtttacttgaccttacatgtaggccttggcacatttcgaccagtgagtgttgaaaatatagctgaacatcaaatgcacagtgaattttatcgcttaacggaagaagctgctgctcagttaaatgatgttcgtgacagtggtggaaaaattattgcagtagggacaacgtcgatccgtaccttagaaacgatcgggacgaaattttctggggaaatcaaagcagatagtggctggaccgatattttcatcacccccggctatgagttcaaaattgttcaagccttttcaaccaattttcacttgcccaaatcaacattagtgatgctggtaagtgcgtttgctggacgtgagaaaacgttgtctgcttatcaccacgctatcgaggaacgttatcgctttttcagttttggcgatgcgatgtttgtgaaataaaggaatcgaaaggtaaggcactagatacagtcaagtatttagtgcctttttgtcgttgaatagtccttagaagctaaagcaggaagaaaaactgaccgctatcttgaagtaaggaattcatttttcgaaacccatgaaaaatgagttttaatctcgccacgcctacgattcgactaaagtgttcaacatttttgacagtctaaaactttatcatagcggatattaataataaatactgcgaaaagtcgaactcgcaaaaaaagccaggctctcgataagcctggctcttagaatttcggaaggattagttcattcgaattttatattactttatgatacatgcaaagtattacatgaatttcttgactataaacataaatatttgtttttactacgttttcacttctattcagttttaagaaactttttcttacttacgtatcattttacttgtgtgtttgatgtactactcaaccttggatacgcattcactatttataaagaaatacttcacacgtacactattgacaacttttcggtgaatcttgtattactaacaattttattgtttacttttttctactttcctttatcgagaaatccttcgaatgatctaagttcctccttccttgtatctataatatagcacattaccaacttttttgaaagcgattacctctggttattttagatatttatatttgttactttttgacgaaaataaaaggtgtatgctttgagttcacctgcttttctgtgttatagtaataatatagacaagttttttataacaaaaggaggaataggatggaaccctacaaagagacagtggatgctgtagttagcgaatacgatgctagtttggatgatggactgacagaaaaaaaagttgaagagaaaataaaaaataacggtaaaaataaatttgatgaagcgtctaaagaatcattggcaaaaaagtttttccatagtttgactgattttacaacgattattctattggtagctgcagtaatatctttatacactgccattgctacagatcatggtgattatttcgagagttttctaattattgcgatcgttgtgattaactctgttttagcaatcgtacaagaaggaaatgcagaaaaagcattatcagccttacaagacatgaacaagcaaacggctactgttatacgaaatggtaaacaggaagagattgatgcagaggacttagtgccaggtgatacattattactggagtcaggctcgatgatcacagcagatgcgcgaattgcagaagcctcacaattacgagtagaagaatccgctttgactggtgaaagtgaaccagtgatgaaagatccggaataccaaggtgaagaagacgattctttaggtgatcgtttaaatatgctttacaaaggctcgacagtagtaaacggccgcggaaaagcaattgtaacggcaacaggtatgaaaaccgagatgggaaaaatcgctggccttttaaatagtgatgaaactcaaaaaacacctctgcaaaaacgattaaatcaattaggcaaacggatcagtttgatcgctttggcagctgcggcttttgtgttcttcattggacagatgcaaggggaaccaatgctagatatgttcatcacagcaatctcattagcagttgccgctgttccagaaaccttgaccgttatcgtgaccttaaccttggcatttggcgtacagaagatggcgcagaaaaatgcgattattcgtcggttacctgcggtagaaacacttggctctgcgaatgtgatttgttcagacaagaccggaaccctaacgcaaaataaaatgcgggttcgtcgcgtttggacgcatggggattcggtggtggatacagaagaaggcatgactgatgaagcgatggaagtattaagtatcgcggccttgtgtaccgatgtcatcgtggaaaatgatgataatgaattagaaataaaaggaaatccaacggaagcggcgattgttcgtgccgtggaagaaaattatcatacgaaagcagaactggaagaaaaatatccgcgaattggagaaataccatttgactcagatcgaaagatgatgacgactgtacataagcgcggaaagaaatttatctccattacaaaaggcgctttcgacgttttatatccgaagtttcattatggtgacgtagaccaagcggcgatcgtcaatgatcgctttggaaaaaaggccttacgggtcattgcagtaggttatgcgatccatgaagaagaaccgaaagagattacttcagaagctttagagaaaaatttacgtctgatgggattaatcggaataattgatccaccacgtccagaatcaaaagcggcaatcgcccgtgcgaaaaaagccggaattaaaacggtcatgatcacaggggatcatgtcgtgactgctggagcaatcgcaaaagaactaggtatcatgaagagccgcaaagaggcgatttctggtgctcagctgcaaaaaatgactgatgaagagctggatgatcgtgtcaaggatctatctgtctatgctcgagtaacaccggaggataagatcagaattgtaaaatcttggcaacgatcaggagctgttgtggcaatgactggtgatggtgtcaatgatgcgccggcattgaaagccagcgatgttggttgtgcgatggggattacaggaacagatgtggctaaaggcgcagccgatatggttttgactgatgataacttcgcgacaattgttgatgcagtcgcccgcggtcgttctgtttatcaagggattcgcaaagcgatcaatttcttgttaagctgtaatatctcagagatctttattgtggttattgctatgctgctaggctggggtgcaccatttacagccgttcaattgcttttcgtaaacgtagtcgctgatggtttgccaggttttgcgttaggtagagaaccagcagaagcgggaatcatggatgaaaaaccaattcctcgtgatgaaggaatctttgcccgtggcctctggaagaaaattggtttgaatgcagcggtctttactgtagtgacattgatcggtttttatatcggggcttttgtcgaacatattagctactttactccgcctagtttagaagttggtcaaactgtggcattcttggtcttagcttattcatcaatactacatgtatttaatgttcgcagcagcaagtcgattttcaaagttgatttagctacgaataaatcattggcgcaaatggcttggttggcactaggaattaccacggcgattgctttgattccgcaaactcaggagctgttctacttggttccgattagtatgaatcattggattatcgcgattctgctttcattagttccgatcattgtgactgaactaattaagtttcacaaagcgccggaagtcgatccagaaaatatataaaaagcaagcgctaagttgaaatcagcttagcgttttttgtctgtttaaaaacgacctgtataaatctataaaaatagttaaatttatcgtttatcaacaaaaaaatattgaatctcaatttctcgaatgctaatctatgggtatcaattttagcgaggtgttttgatgaagcgtaaggtcaatttgcttaaactggcgttaattattatttcgttcttggttatctttgtcacagtgatttttactttccaattctcttcggaaagaaaagacgtcattaacagtctactttactgcgcggtttttggttccgttgtattaggatttcgtgtgttgtttctattaaatcgaattttgaattttattaagggtgcggaggctttttctgccaagacgttgaaggtcgtttcgcagattaagaagcttattttgttggtcagtatcgtatttgtaggtattttaccttttttttacagagttgctgatcggcaagatgctcctggcgtaatggtgattggtttagcgttcgtttcgattccgttcacagcgtttatttttacgcaaattgtcgaggaattatttaaaagtgccactgagttgaagagtgacagcgagttaaccatttagggggaaaagatggcgattatcattgatttagatgttgttttggcacagcggaaaatgagtgtgagcgaactctcggagaaagtcggaattacgcttgcaaatatatcaatactgaaaaacaaccgtgcaaaggcaatccggttttcaacgttagacaagatctgcgaagttctggagtgccaacctggtgatattataaagtatcaaggagattgagatgaatagaggaagtatccttctttcttaagctctagatagaaagttgcaaaagcggtttaaaaccagtatcatgatacaagttgcagacttatacatatagaagaaagtaggaaattaaatgactgaacctgccatttcttatcgtttaataaagaaagaaaaacatacaggagctcgcctcggtgagattatcacgcctcatggaacattcccaacacccatgttcatgcctgtaggaactttggctaccgtaaaaacgatgtcgcctgaagaattaaaggagatgggtgccggtattatcttaagcaatacctatcatctttggttacgtcctggagaagatttagttgctgaagcaggcggcctgcacaaatttatgaattgggatcagccgattttaacagattctggcggcttccaagttttctcattagcggatatgcgaaatatcgtcgaagaaggtgttcatttcaagaatcatttgaacggctcaaaaatgttcttatcaccagaaaaggccatcgatatccaaaataaattaggctccgacatcatgatgagctttgatgaatgtcccccatttgatgaaagctatgactatgttaaaaaatcagttgagcgcacgtctcgctgggcggaacgcggtttgaaagcccatgccaatccagcgactcaagggctattcggaatcattcaaggtgctggctttgaggatttgcgtcgtcaaagtgccaaggatcttgtcagcatggactttcctggttactcgatcggtggactttcagtcggtgaaccaaaggaagaaatgaatcgtgtcttagaatttacgaccccattgattccagaaaataaaccacgttacttgatgggcgtaggagctgcggattcattgatcgatggcgtgattcgcggtgtcgatatgttcgactgtgtattgccaacgcgaattgctcgtaatggtacctgtatgacctcatctggacgcttagttgttaagaatgcgaagtttgcgcacgatttccgtccattggatgaaaaatgtgattgctacacttgtcgtaactatacgcgtgcctatattcgtcacttgatccattgtgatgaaacttttgggattcgtctgacgtcttaccacaatttatatttcttaatcaatctaatgaagcaagttcgtcaagcgattatggatgataatctattagaattccgccaagccttttttgaagagtacggctttaataagcaaaacgcaaaaagtttctaaagtctgaataaaaaagctagtgtaaccttaaaaactttgttacagttaaaagtggatttactaagaatgcgaggggaaatttaaaaatgggaaacttttcaatgattatcttacttgtgttgatgctgggaatgttcttctttatgaatcgttctcaaaagaaacaacagcaagaacgtcaaaatttattagatgcaatgaaagttggagatagcgttgtaaccatcggcggcttacacggtgtaatctctgagatcaacaatagcgacaaaacagtcacgttagactgcgaaggaatttacctgatatttgatcgcgcgtcaattagaacggtgaaatctggcgtacgtccagctgcagcacctgttgaaccagccgcagttgaaccagaaacaactgaaccaacagaaccagtcgttgaagaaacaccagaagataaaactgaagagaatacagaagaaaagtaagattttttcttgcttcaataagctctaattaggtgcgtagttatacgcgcctttttgtgttcatttttctaatgtcctcttacatattgaacagtaaaccaatcattaactgaaaaaaccagattgcttattataagtaaaaaataaggagaattagtttaggaaaaagccccagatttcgtggatattctgagaaaataagtaaaagtagtatttcggatagaatcataaggggattaagagaagcttttacttccaaggaagtttgtttggtaaattgtgtgaattggagggggaaaaatgaagaaaggaagcaaattttcattgtttgttttgctgttactattgggttcttatttaatgacgttgggctcagcacttccaatagcttcaacagcggcaagcgatattacaaagaacataagcattatcggttcgaagataatagacaacaagggtgtcgaaaaaacaacagaaaatccgattcgggtaaatgattcgattgttataagctatttattgaagatcaaccaagaatggatgattcaaattgaagcaggagatacattcagagtttctttgccggatgacacttattttcgcgttaaggataatctttcagcgctatcattgaaggattcagtaacaggagaaatatttggtcaagcttcgctaacaggaaatcatttgacagtgaccatcaatgagtcaggtgcaaggcaaaaagtgttaaatagtcttcaactaacgatcgggctgaaagctgtaaaggcaggaaatgagattgatgcaggaggcaatagctcgttgaatatacctaaaattgagacgcctcttacaactgttgaactccttcaagctgaaatgaaggttgaaggaaaaatggcagcttctagaaattttgagtatgttatcgtggatcaatcagatgaaggaaaaccaattgcctatggagtgacagaaagaatgctggaccggcaggacgaatcagtaatgattgatttttataaagttaaaacaattgaaggtgcctttaaagataaaattgaaacagactggcgaacactgttaaaggatggacatagttatttgattcatgaggttcctgatcctgaatacgttgctgtgattactggcggtatcggagagggaaatcaatatgattatcaagctgagaaaaatcgaagcgttcgttttcgaatcttgaagcaaccagtaacgaagaaacaattgtcaagcaaaatttcagatattccaatgttagcagttcctaaaatgaagaagatagaggagacaacgtctattgaaagaggcgttaaaaaacaagcagcgaacgatttcttaacaaaagaaacgaaaacacctgtatcgacgagccgctctgataaggaaggtaaagaagagaaaggaatcaatttgacgaaaactgattcagcgacgggagaaaaacttcagggggctgagtttgaactaaaaaatgcggcaggggaaaaaatgtatcttcgtaggaagctgatcactgacgagaatgggctacttcatatcaactccttaccggagggcgagtattcattagtagaaataaaagcaccagaaggatatgtacttgatagtgaaccattaacatttacttttactaaagaggataaattagtcgtattaacaaaagagaatgcgaaggatggggcagcagttccagtaaaaaaagattttcctcaatcgtcagaaacacgtgaagaattcagcagccagcaagcgagcaaacccagctccaattcaaaaaaacaatatccacggacaggagagttaacaaatccattagtgacgatcttaggctttggcatactgggtgtactttggatagttagaaaaaagataggataatgattggttaagaagaaggaagaacgcaacaattttatcattgctgcgttcttcttttttcgttcaagagactgtaattgtgaaaaaagttctttgatagcgtttttataagttcaaaataccataaaatcaaatgttcaaataatattgatattatagcatttgttaagaataagaaatggtgtgaaaaaaatcacaaaaactatttacaaacgattgacggtgttgtatgatgtgtatgtgaaaagtaacacaaaaatttttaggaggatacacatggctaaagcgattgaaaaggaaaaagacgcaatcagcgttgagcaagtgattgatgaattagcagcaaaagcaaatgttgctctgaaagaaatggaagatttcgatcaagaaaaagttgaccatatcgttcacgaaatggcaatggctgcactagacaaacatatgatgttggcaaaaatggcggttgaagaaacaggccgtgggattgtcgaagataaagcaatcaaaaatatgtatgcatcagagtatatctggaacagcatcaaacatgacaaaacagttggcgtaatcggcgaagacaaacaaaaaggattgattgaagttgctggaccagtcggcgttgtttgtggtgttacacctacaactaacccaacttctacaacgattttcaaatcaatgatcgcattgaaaacagggaatccaatcgtatttgcattccatccaagtgctcaaaaatgttctgctgaagccgcacgtatcgttcgtgatgctgcaatcgcggcgggcgctcctgaaaactgtatccaatggatcgaaaagccatcgatcgacgcaacatcaatgttaatgaaccatccaggcgtagcaatcgttcttgcgactggcggacctggcatggtgaaatcagcatactctactggtaaaccagctttaggtgttggtgctggtaacgtaccttcatatatcgaaaaaacagcgaaaatcaaacgcgcagtaaacgacttgatcgtatcaaaatcatttgataacggcatgatctgtgcttctgaacaagcagtcatcgttgataaagaagtttacgaagaagtaaaagctgagttccaagcacatcaagtatatgtagtgaaaaaagcagaattgaagagattagaagacgctgtaatgaacgaaggcaaatatgcagttaaccctgcaattgttggacattcagctgaagatatcgcacaacgcgcgggtattaaagttcctgctggcacaaagattctgatcgcagaattagacggtgttggtgctgattacccattatcacgtgaaaaactttctccagttttagcaatgatcaaagcaaatgatcaccaacatggtttcgatctttgccaaggcatgcttgaattaggcggattaggacatacagcagttatccatactgaagacgaagatttacaagtgaaatttggtttgcgtatgaaagcttgccgtgtattagtaaattcaccatctgctgaaggcggtatcggtgacatctacaatgaaatgatcccatcattgactcttggttgtggttcatacggtaagaactctgtatctaaaaacgtatctgctattaacttaatcaatgttaaaactatagcgaaacggagaaataatatgcaatggtttaaattaccatcaaaaatttactttgaaaagaactctctattgtacttgacgcaaatggaaaatgttgaacgcgtaatgttagtttgtgaccctggtatggttcaatttgggtatgcggacatcgttcgtgaagttcttggacgtcgtacaaatgatgtgaaaatcgaagtattctctgatgttgaacctaacccttcaacaaatactgtttacaaaggtttagaaatgttcaacgagttccaacctgatacagttatcgctcttggtggcggttctgcaatggatgcggcgaaaggtatgtggatgttctttgaacacccagacacatcgttcttcggcgcgaaacaaaaattcttggatatccgtaaacgtacgtacaatatcggcaaacctgaaaagactcagttcgtatgtatcccgacaacttctggtacaggttctgaagtaacgccatttgccgttattacagatagcgaaacacacgtgaaatacccattggcagattacgcgttgacaccagatgttgcgatcgttgaccctcaattcgttatgacagtacctgcttcagtaacagcggatactggtatggacgtattgacacacgcaatcgagtcttatgtgtctgttatggcatctgactacactcgtggattaagcttacaagcaatcaaactagtctttgaaaaccttgaaaaatcagtgaagacagctgatccagaagcacgtgaaaaaatgcataacgcatcagcaatggctggtatggcattcgccaatgcattcttaggaatttgtcactctatcgcccacaagattggtggagaatacggcattcctcatggacgtacgaatgcaattctattgcctcatatcatccgttacaatgcgaaggatccgcaaaaacatgcgatgttccctaaatatgactacttccgtgcagatgcagattatgctgacattgctaagttcttaggacttaaaggcaatacaacagcagaattagttgaagcattgatcgaagcagtttacaacttaggagctacttgtggcatcgacatgaacttgaaagcacaaggtgtaactcaagaaacattgaattctaccgttgatcgtatggctgaattggcttatgaagaccaatgtacaacagctaatccgaaagaaccattaatcagcgagttgaaagaaatcatcgtaacagcttacgattacaaagcataaaaagtttagaaagtcatttgaaatcagattatctgatttcaaatggcttttattttttgctgtctatatcaaaataggaaagaaagtattcttataatttttgaaggagataacaataattgtttttgtttaaaaaattcaattctttaacgcaaaatggtcctctttgattgttatagtctgtgaaaaacgatagactagaattaggataagaggaaggattcgaagggcatggagaaactgaaacgagagataaatgagttggctgaatcaaatgcacgattaggcatgttgattgattatttagtggacgaaaaaaatttaatggcaagtaagtcaaaccatatttttatgttagatatgcaggattatgtagctgcgctaaaaaaattaacaccttcggattcgaaaaagtctgtggcgcttcctgaaatcaaacaaatcaatcatttgctgacacgacaatacgaattgatgaaaatgatccaaagagactatgctcggcttgaggctcagggaactatccctgaggagctaacctttgataaggataagaaaaagcattttcgacgtctgcaggttattaatcaattattattacaggacaatatctttttccaatcaatgttagatgctaaaaagattagcggtaatattcggatcggtgaaaagaaaaattggctgcaacgtcttttcggaaaataaatactgctcttgattttagaagtaaaatattactataagcaaagaggatgagacctattgatctcatcctcttattatttgtaccttaattgcgtaccgctagttttctataatcgatgctgcgagcttggcaccattcttttggcgcgccactgataatgataggattatggatcaaatctgcagtctttgctttgttagtcatcagatacaaacgttgaagctgggatttccaatcttcaatcatttcaatcgtagcatcaatgccattgctgattagatgatctagaatcgtagcggagatgccgactgctttagctcctaaacaaagagctttaaaaatgtcataagcatcgcgaattccgccggaagcaagaagcgtcagatgatcaaattcttgggcttctagcaaagagattaccgttgattggccccagtcatctaaatagttcagttctctttttttacgacgagcattttcgatttgtgagaagctggtaccgccgcgcccagaaacatctacggcttttacgccaagtgtttggaattgctgaatggtttctcggttcatcccgaagccaacttctttaatgattacaggaatatctaattgttgaacggtttgctggatattatgcggccattcgtgaaaatcacgatcgccttcaggcatgacaagttcctgtggcacgtttacgtgaatctgcatgccgtcagcctgaagcaggtcaacgattttttttgcatcttcactctttctgcccgcccccatattgcctaagatcaaaccgtcaggatttacttcacggactacactataagagtctgcaacagttgaatcttttaacgctgcactgacagaaccggtagccatcattaagtttgtttcacgagcgataatcgctagatcatgattgatctttttggttttctcactgccgccggtcatcgcattgatgtagaagggggcgctaagctgcaagccgagaatctcggtacttaaatcaatttcttctggtagtatagtgacgaaagaggaatgaatcagacgaacagcatcgaaatcattttcttttggttgttgatggaaggctcgcgccaaggaaacatgttcatctttacgattcatggtagccctccgtgaaatgatagacgtgtaaaggaagcggtgtaatgccggccttttcccaagaactcatcagaggaagaatacccgcgcgcttatcaacaatcacgatcccgcaatcgccgccgccagcaccagatgatttcgccgcgccaccatattgttctgctaaatcattcaaacgtttcaattcttctgtttcaatcgaaacgttgctaagactggttaattgattcaatagactacggtttttacgaatcattttttgaatcaaagccacatcattttgtttgaaaccttgaatcattttatcgacacattttttactttcttgaagaaagttttcataggaagttttcttctcgtcccgagattgatgaacctggtcgactaaatcggaagtcgatgcgggactgccagtccaaccaatcaataaacgtaaatcttccggcacttctaaaggttcaatttttagactaggccagtcactttcaattaatgtagtcagtctttcagattctaatttgtttagtacccaatcgtgatcaaaagtagaaaaggccagccagccgccgtaacagcttgccgcaatatctccgcaggagccatttccctgtacatttaaatgggctaaagttgctaatttgaacaattccagctgagaaagctgtaaattataaaaagcatttaacgctttaaccgttgcaactgttaccgcaccgctagagcctaaaccatatttacgaccgttagaattatctaattcactggttactttcaaatcaaagaaggctagttgtttccctttttcttgagcgaacttttcagtaaaatggattgccgccaaaatgtaatggaagggattgtcgcgaatatctaaaaccaattcatttttacgtcttgtccaacgaatcggcatatcactatattgggcagattgaatactgccgctttttttagtagggccgatcgaaacggaaataaattgatcaatcgctgcgataatagccgggtgtcccggttccaccaccgcgtactcaccggcgatatataatttcccaggtgctgttacttcgatcattttatttcctcctctgtcaaaatttcaattgcaggaccagcgtgggcgacaacgagttgttgactgtccatttgatccttcaatgtgcgaagtaatgcttcttcgtttttacgttctactaaaatctttacatttggaccagcatccatcgtgaagtagcaaggcaatccgctgcttctaatttgacgaacaaggttcatcactttcatactttccgctgaccaataagtaaacggcggattcgctgctaaagtggtaccgtgcattttcaatgcactggcttcggttacttcgcctaaagcagtgaaatctttttcagcgattgcttgctttgccttagctaaatctgctggtacagtttgtagccagccatcataaaaagcagaagtttccacagtgcgctgcatgccatcgcgacttgaaacatctttttgtgcatcattgacgacgacaaagatcatacttaagccatcttcaaagccgccgctgggaatattgacagcataagaggtttcatcagaatcacctttttgccattccgcaaaaccgccgtaaatgctgcgacaggcagaaccagaaccacgacgtgcgagacgagacagctctgcagatgagagcttcaaatctaatgcggcacttgcggcacctgctaaagcggccaatccgctagcagaagaagccaagcctgctgcggtcggtacgaagttttgacttttaacaatcgctcgcaaggaacaatcggctttgtcgcggatgacattaagaaagcgactcacttttaaggtcgctttcgaatcttgtagttgattgtctaaatagaattgatcttcaatgagctcttctgaaaaggtcacatgtgtttctgtataaaaagcatccaatgtcagcgataagctgttgttcattgggatgattaattcttggttttctttgccccaatatttaatcaaggcaatatttgtataagctcgagctttaccactaaacatgtgcgtacacacctaacccttcgatccatgtatttcgcgcaccagcatccaatagaatttgctgcagctgacgtccgctagtctcatcttctgccagagcgatcatgcagccgccacgtccgccgcccgttaattttgctcccagggcttgattttctaaagctgtttcaatcaagtggtctaagtgacgattgctggtacctaataatcgtaataagccttgtgcctgattcatgcagtcgcctaaattccgtggttggttttgtaaaatggctttttgtgcttggctagttaattttcctagtgtctgcatttgcttattagtttcatagggacgcatctccattaattttgcgatgtctttaaccgctttacgtgtctgtcccttcacacctgtatctgccacgactaaaaaggcatccatatttaactggaaaggttggaaaccaatgcctctttggtaaaggatcggttcagtaccgctgatggttgtcgcatcaataccgctaggattgccgtgagcaaccgcttcagcttgattgacaaaatgcagtacgctatcttgtgtagcgggttcttccatccagtcaaaaacagcacgtgtaattgcgaccgctactgctgcactagagcccattccccgttcagcggggatggagctttcaatttttaaataaaatggttctggaattttaaaatgcttcactaaataccatagtaagaccgtcacgttgcgcattgtatttggggcttctgaaagcggcccatggaagaaactagattcgatccatgattctactttatttgcgcagatcgttgtttggatgcccgttcctgaaaaaggaaaggcaatcgctggttccccgtagacaactgagtgttcccccattaagatgattttcccgctggcataacccgtgccaatcgatttcattcaaaaaacccctatttcgttttagagtcgttctttctcataagaaaaattaaaatattcttgttaatatttattttaattgaactgttcttgtagtaaaaacaatttgttttcattttatcttttactagaagtgctaacagaaaccttacttagtaataattacctactttagtctcttcccattttactcagagaagacggacaagtaaacgaaacgactgaaaagtttttgaaaatcagtgattttttaaacattctttagaagaaaaaagtgattttttagataggtattttgattgacgatacaagatattgggggtatattagaaaagttgagaaataattactatattttgtatgaagtgagttggaggtttatgagcgtgattgtattagcaggtaccattggagcagggaaatcaagtttgaccgcgatgttgtcagagcatctaggtagtcaggctttttatgaatcaattgatgataatgaggtattgccgctgttttatgctgatccagagcaatatgcttttttattacagatttattttttaaacaaacggtttgacagcatcaaaaaagcaatgcaggatgacaataatgtgctagatcgctcaatatatgaggattctttattattccatctaaatgccgatcttggtcgggcaacggagacagaagtgaaggtttatgatgaattgttggcgaatatgatgcaggaattgccttatgccgctcacaagaagcatccagatttgttggttcatatccgtgtttcttttgaaacgatgatggaacggattcaaaagcgtggacgtgaatatgaacaactggaatttgatccaaccctttatgattattataaagaattgaacagccgttacgatcaatggtatgaggactacaatgagagtcctaaaattcaaatcgacggggatcgtttgaactttgtagatgatgctgccgcacgcgatgaagtcatacgcttgattgatgaaaaaattttagaagtccaaggtgtcgtattcgaataatgaaaagatgcttaatcttaattggttaagcatctttttttgccaccaccgcttcaaatggtcgcaatgtcattgtttttttccatgacgaatcttgataattcgccaataaaatcatggctggtgcgtttacccagcgattgggtagggtgacagactgcggctggtcactcaaatttgtgaggacatacgcttcctctaagtctagtttgcgggtgtaggcccagactttgggatgttttgctagttcgatatgataactaccgtttagaaaaacaggcaatgactttctcagtgcaatcaatttcttgtaatagtttaatggagaaaacgggtctgcttcctgaagtacaacgttaatcttatccgtgttaggattgatcttcatccaagggagatttgttgaaaagccgccaaagtcagtccagtgcatgggtgttcgagaatgatcacgggtccaatgagtgattaaacgcaaggcttcttctggtggaatacctttatttagacaatcatgataagccgctagtgaatctgttgcattgacctcttcaatcgattcgaaagggaagttcgtcattcctaattcctgaccttgataaatgaaaggtgtccctctcaatagcatataagcagtagctagtgccgtagctgattcatgggtttcattgccaaaggttgagttgctgcggggattatcatgattatcggtatacaatgcattccatcctagcagctgcatgtctttttgccagcgggataatacctttttgaagcccagcagatcgcctgtttcagagccgggttcaccagttcgaacctgatgctccagttcgaagatcatatcgatatagccgctctcttcatcggtccaaaatggggctgttttactattcaccccgcttgcttcaccgacagtcatgatgtcatagcttcggaaaatctctcgcaattcggccatatacgtttcgattccggcaacattcatgaagggcgcccaagggttagacgtgattttaaaatcccaaggttctttttgaatgtggctgatggcatctaaacgaaaaccgtcaatgccgaagtccagccaccagcgaatcatttggtaaatattttcccgcatcgctggatttttccaatttaaatcaggctgctctttagcgaagacgtgaaaataggcctgttttgtgttgggatcataagtccaggttgacccgccaaaaaaactttgccaattattcggcattttctccggcgtcgcatcggcccataagtaatagtcgcgataaggattgtccttgcctttttttgattctataaaccaagggtgctgatcgctggtatggttgacaactaaatccataataagacgaatccccagctcatgagcagcagccaacaagtctttcaagtcctcaagtgtcccaaattcaggattgatggcttggtaatctgaaatatcgtagccattatctacatttggactcttgtaaataggatttagccaaataaaatcaatgcctagctcctttagataagtgagttttgcttggataccctttagatcaccgataccatcatcgttactatccataaagctgcgagggtaaatttggtatcctacggcatttttccaccatttagtcatatgtcttctcctagttctacgacaaaggcatcccaaggttctaagtgaatggtttgttcacgtgggataacagtcgttaaatttgaaatgatgacctttcctaacgttccctcgggataagtaaatgaatgaggatcatttgaaaagttcgtgacaatcagccagcgcttgttttcataaattcggagatagctgaagacgtcatcggctgtttcagtcaataatttgtactcgccccataccatgatcggttgttcttttcgcaactggatcaattgttgataggtgtagaaaatggagtgaggatcacgtaaagcatgtgtcacattgatcttgggataatttggcacgactgccagccagggagtacctgttgtaaaaccggcgtaaggggaagcgtcccactgcattggcgttcgtccgttgtcccgtccttttcgattgattgctgctaaaagcgtttctttggattgtccggcagcgagccgttcggcatacatatttcgactttcgatatcctcgacttctgtgatgtccgcgacgacatgattggtcatgccaatttcttctccttgatagatatagggcgttcctttcatacaatggagcaaaatggctaataatttcgctgatttttcatgataatcctcatcatttccccaacgtgacacaatacgaggaaggtcatggttgttccaaaaaagtgaattccaaccttgatcacctaattcggtctgccattttgaaaagacttccttcaattcttttatctgtaaggggcgactcacccatttggattgaccggcgacttcatctaagccgatgtgttcaaattggaagaccatcgacagttcatcgcgttccggatcagaatagagcttggcgatttcgggagtagcaccccatgtttccccgacagtcagtaaatcttttccgccaaaggttgcctgattcatctcctgtaaataatcatgcagctttggtccgttgccggtaatttcttcatcaggaatttttccaataaggtcaatcacatccatgcggaagccgccgatccctttatcaatccaaaaattcatcatatcgtacaccacttgtcgtacagtaggatttgcccaattcagatccggttgttttttgctaaaaagatggaagtaatactgttgcgttgtctcatcatactgccaagcaggtccgctgaagatacttttcaaattatttggataggtgttgtgaacaggatcacgccaaatatagaaatcacgataaggattgtctttcgattttcgggcttcaataaaccagttgtgttcatcgctggtatgattgacgactaaatctaggataattcgaataccacgttcttttgctgcttggatcagctgctccatttccgccatcgttccgaattcctgcatgattgcttgataatttgagatgtcatagccgttatcatcgtttggactttgatagaccggacttaaccagattgctccgattcccagcttctgtaaataatcaagacgcgaaataattcctgccaaatctccaatcccatctccattcgtatcttgaaagctacgtgggtagatttgataaacgacaacttcttgccaccaatgatgcatatactttaacctcctaaaaaatgcatggttactttttcaaaatgacaaaaccattgggctcaattgcgatactatctcctttgatattcgcaagctgcagcataaggacttcatcagatacctgctcgaaaatggaatgattccccgtattgaagataccgatgatcttttcgttggaaatgtctcgtgaaaaaatcagcgttcccgtagacgtatccaccttttgccattcaagcgatccttcacagagggtgaattgattttctcggcgaagtgcgatcaactgctttacaaattcgaaaagttgcaaatcttgtttttctggatcccaaatcatacattttcgacaatctggatctatgccgccatccaaaccgacttcatcaccgtaataaagacaggggattccttgctgtaaataaagaaaggctaaaacctgtctcattaggtctttattaccaccagccaaggtcaatatgcgtggtgtatcgtggctatcaatcgtgttaagcatcatttgattagtttgtttgcgataaagcgtcagctgttcattcagattgctgaccaatttatctaatggaatcgttctttccaagaaatagttaatgatcgattcggtaaaggcataattcatcactgcagtaaattcatctccttgaagccatggctgagagctatgccagacttcacccagcagataaaaatcatcctttaattcgtgacaggtcgctgcaaattttttccataattgatgatctacttcattggcaacatctaaacgccaagcgtcaatgtcgaattcttgaatccaatattttgcgatcgacaaaatatattcctgaacttccttgttggcggtattcagctttggcatgtgtggagtaaacgcaaacgtatcgtaattcaagtcttcagcaacttcaaaatcgtcagttttcgtatattgaacaggaaaagaatggatatgaaaccaatctttaaagcgagatttttctcccttttcgagaacatcgcgccattgtggggaagtatctcccatatgattaaatactgcgtccagcataatgcggattcctcgtcgatgacattcctcaatgagtttacggaagagctctttatcaccgaaggcaggatcaatctctaaatagtccgtagtatcgtatttatgattggaaggtgctgtaaaaatcgggcaaaaataaatcccattgattcccaaatcgcttaaataatctagatgatcaatgacaccttgcaggtcaccgccataaaaatcctgttttccaggatattccttactgtcccaaggaagcacgccttctggatcgttggacggatcgccattggcaaagcgttccggaaagatttgataccagacagtttctttcacccattgcggcgctttaaaacgatcgatttcatggaaaaacggcatgcgaaaataattattcgccatcaataaatagttttcttcaaccggaaaaactccatgttcagtgaagaacaccgtcgtttcatcatagccggtaacaataaatccgtagcttaaccgatgataaggagcggtgacatcaacttcccaataatcataaagatctgtggatagtgtttttcgcattgcagacggctgcttgtaccagcgctttttttctagttcatagggatccccatgaactaacgaaacgtttttgcagtctgcgcgtgctgtacgcaaacgcacgtgcatcagttcgttggtgtatagataggcatattcgctttcagtacgatgatagattgctgctgtattcatagaaacctccgtagttaatcgattgctttttctgtgtcactatcgaaaaagcgcgctttgcttaaattaaaggctagatcaatttgttcaccaggatcatggaaatctcgagcatctactttagaaacaaattctgtgtcaccaatcgttgaatacagcatggattcatatccaagcagttcgctgacaatgacagtagctgaaaccactgaatctttataagcttctaaagcaacctcttcagccgtgatatcctctgggcggattccgaaagttaaaggttttccttcataaccctgtgccgataagaccttcgcctgaccttctggtaaaggcaaatctaaccctttttgatttgtgatgcgtccatttttgaaaacgacctcaaagaaattcattgctggactgcccataaagccagcgacaaatttattagcgggtctgttgtacaattcttgcggtgaaccgacctgctgaatcacgccttgattcataatcacgatgcgatctgctagtgtcatggcttcagtttgatcgtgtgttacgtaaatcgtggtagagccaagtttttgatgaatcttagcaatttccgcccgcatttgaacccgcagtttcgcatctaaatttgataaaggttcatccatcaaaaagaccttcgcgtcacgaacgattgctcgtcccatagcgacccgctgtcgctgtccacctgacatatctgctggctttcgatccaataattctgttaagcctaagattttagcagcatcctctacgcgttttttaatttcttctttcggatattttcgtagtttcaatccaaaagccatattttcgaacacagtcatatggggatataatgcataattttgaaaaaccatagcgatatcgcgatcctttggcggtgtatcattcattcttatgccgtcgatttcaaagtcaccttccgtaatatcttctagacctgcgatcattcttaacgtagtggattttccgcaaccggaagggccgacgaagacaatgaattcacgattttcaattttgagattaaaatcctttacagaataggtattattgttcggatactttttgtttatgtgcttcaaatttagttcgaccatttgattactcctttttccttttaaaatatttatttttcctccagaaaaataagcctgattgtcaagtcgtatgtcatccaactatactgcttgccataatatcgtctcgtttcacctgacattctttttgcacgaataaaattgggaaaagttggaccgcaatcattttttattcatcggttattgtggtgcaattattacatattgtgcaatcggttgcaacaagtatatttatagtctcaatagaatttctaagagttctaattgaaatttcgagtactaaacatggtgggaaaccgcaaatggatggttcttttcttgttttgatatttcgtaaaaatactcgaacaaagataattctagaaaaaaataaataaattaagcgctttctcttgcaattgtgcgcaatcggttgcataatgtgccttgtagcaaaaattcaattaacacaggaggaagcgaaatgaagagcaatttgaaaaagtatttattatcaggggtaatgttaggtgcaacagccttaacattggcggcgtgcggttcagggtcaggtgaaaagaaagcatcaggctcgtctgataaaacagatgtcacgttatggatcaccacagattcaaaaaaattctatacgaaagttttagaggattttgagaaagataatccagatatccatgtgaaggtcgttgaaacagaagatgcaaaagcacaggaaaacgtgaaaaaggatccttcctccgctgcggatgtttttgcgctccctcatgatcaattaggacaattggttgattcaggagtcattcaggaaattcctgaaaaatatgtggatgagatcaagtcagctcaatcagaaacagctttggctggtgcgacttataaagataaagtgtatgcgttcccatatgggattgaatcgcaggttctgtattacaacaaaaaaatgctaaatgaaaatcaagtcagctcctatgagaatatcactaaagacgcgacatttggtgcaaatttgaaagctgttgacgcttataaaatcggaccattatttatgtcagtaggggataagttgttcggtgatactggagaagatgtgaaaggcacggattggaacaattcagctgggatttccgtcttacagtggattgccgatcagaaaaataattctggctttataaatgtcggagatgattatatttcgcaatttgaaaatgagaagattgcagcatttgaatctggtccatgggataaagaaaaagctatcgaagcggtaggaaaagataatttaggaattgcagtttatccaaaaataactatcggcggcaatgaggtacagcaaaaagccttcttgggtgtgaagctttacgcggtgaaccaagcaccagctaatggcgattcaaagaaaatcgctgcagattataagctagcttcttatttatccagcgaagcggtgcaagaagcccagtttaaggatgaaactagaaatattattccatcgaatacaacgattcaagaagccgattatgtgacgaatgatgaattagcaaatgcagtcgttactatgagtggttcggattactccgtcgttatgccgaagattcctgaaatgacgaatttttggactgcctctgcagctgttttaagtgatacctataatggaaaaatcaaaccggatcaatatcaagcaaaactggatcagttagtgaaggatatctctggtgataagtaagatttagcggatgtcggggcaaaagaaatcatttttttgctccgaaatctttttgtataattgtccgaattaattcgaaaaagggaggttttatcgatggaaatagccgggagttacggcgaagtgatttcgatgaaacaagtgttcaaagaaggtgatctcaaaacaaagctatcatttttaattatgggattcagtaatctgttaaataagcaaatcttcaaagggattttatttttactagctgaaattttctttattatcgcctgtatttatcaaattattcccgggatcgttggtctgataactttagggacgaaaacgcaaggaatgcagtggcaaacgattgatggaataaggatgaaggtttctgttgaaggcgacaattccatgttattaatgatttatggattagcagccattattttttgtggaatattcttttatgtgtattggtgcagtttaaagagcaaccgtaaattatttgtcttgaacaaggaacataagagcattccgagctttagggaggatctaaaaacactgactaatggtcgtttccacatgacgttaatgatcctaccattgattggagtattgctatttacgattttacccttggtttacatgatcggtctggcgtttacgaattatgaccataatcacttgccgccagggcatttgtttgattgggttggattcgcgaattttagaaatattttgacgggacgtatggcagagacgtttatgccactgttgtcttggacactgatctgggccgttgctgcgacagcgaccaatttcttctttggaattttgttggcattattgatcaacaccaaaggcttacgcggaaaaaagatttttcgaacgattttcgttattacgatggcggtaccgcaatttgtctctttgttgattatgcgtaatttattagccaattggggaccagtgaatgcgctgctagagagatggggattgatttctaacgcattaccgtttctgagtgatggtacttgggcaaaattttcaattatttttgtcaatatgtgggtaggaattccggtgacgatgctaattgcgactggaatcattatgaacttgccaactgaacagattgaagcggcagagattgatggtgcgaataagtttcaagttttttgctcgattacgtttccgcaaattttgttgattatgacaccaaatttgattcagcaatttattggaaacatcaataattttaatgtgatctatctattaacagagggcaagccgaacaactctgccctgtatcaagccggagacaccgatttgctggtcacttggctctacaagctgacggtcatcgccagcgactataatttggctagtgttatcggaatcattatttttgtgttgagtgcggtctttagcttattggcctacacacgctcgaaatcttatgaaggaggtctgcaataatgaaaaagcaaaaacgccgtaccttaacgtttgtctatgtcttgttgatcattctttcagtgatttggctatttccgattttatgggtcgttttgaccagttttcgtggagaaggtgccatgtcggttaattatattattccaaaaaccttcacgttagaaaattacaaaatgctattcaccaatagttcgtatccgtttgcccgctggtttatgaatacgctgattgtcgccatcgctacgtgccttatttcaacctttattacagtggcgatcgcttattctgtttctcgaatcaagtttaagtttcgtaatcgtttcttgaaattagcgttagttttgaatatgtttcctgcctttatgagcatgatcgctgtgtattacatcttaaaggcgatggagctggatggtacgctggttgcactagtcatcgtctattctgcaggggccgcgttaggtttttatattgctaaaggctttttcgatacgattccgtattcactggatgaatcggcgatgattgatggcgctacgaaaaaagatattttccttaaaatcacattgccgttatctaagccgatcattgtgtacacggctttgatgacatttatgattccatggatggatttcattttcgcccaagtaattttgggtcagcaaaaacaaaaatataccgtagcgatcggattgttcacgatgctgcagccggataaaattaatcactggtttatgccttttacagcggggtgtgtaattatcgcgatcccaatcacgttgttgtttatggtgatgcagaagtattatgtggaaggaatcacagctggcggcgtgaaaggataattaatgaagtgatagagaacaggaacgacaagagttcgtttctgtttttcttttattggagggcggcagtgaactatcaaagcccagtttttgttatactggactagaacgatctagaccaggaggagtttaatggacagcaaacaaacattcaatcaagagatgtgttcgtggattaatgtggacagcacgcaatctcacgaagtaaagaaattgcgggaaagctacgcaatcagtgatgagatgttgacctacgcgctggacgataatgagcgggcacgtgtggagtatgatccgatggaaaaagccttgctgctgatttttaatgtaccgaacttgttaaaaaaggataatcattatgagacaagtccaatggcctttattttaaagaatcattatttcttttcttttgtaaatgagcggaccgcttatgttgaaaatattatcgacaatttattaatgaatgagccgaatcaaagcaccgcgagtttattgttccataccctatttttgatttctgattattattttcctttagttgaggaagttgatagccaacgaatacaattaaataaaaaacttcgagagaaaacaacaaataaaaatttactagcactttctgatctagagattggtttagtttacttagtaactgcgacaaaacagaatgccgtacttttagagcaagtcaaagtccaagtgatcttttcgagtttcacagataaagaaaaagaagagttagatgatgcgttgatcgaggccaagcaggcggtagaaatgaccaggctgtccagtgaggtcctggatcagctatcgggaacttacaataatttattgaacaataatttgaacgacacaatgaaaattttaacgatctggtcgttgttattaacgataccaacaattgtgactggttttttcggaatgaacatgccgctgccatttacccattctgaaatcggttgggtgattacggtagtgattagtattggactgtccatctggttgattttgattttatggcgcagaatacgttaaaagcgaagcaagctcaaatgagttgcttcgctttttttctattatagattatagaataaaggtttcgatgacttcagccacagcgctttgttcatgatccgcaattgttgtatgctgcgctgcttcttttatagtaggcacagcattcgctactgcaattcctaattcagcttcgcggatcatggctagatcgttgatattgtcaccaatggcgatggtttcgttcatcggaatgcttaaatgatctgccaatgttcgcaatgctgcacctttgttaacgccctttggattgaattcgatataacgattagaggaatagctaatctccaatacatcgtgcagctctttaggcatttcctgctctaattgttctaaatagctgcggtccaaattttgaaacaaagctttgtaacatacgtggtcttttaaaaagtgaatatcatcatcgaatcttttttcgtgaggaatcgtcgttaagtaggcgtcttcctcaggattactgtgatagacataggtttgttcaaacgtataaagatggattgctacctgatagttggaaccgaattcaaacaaacgtgacaggatttcaaagggcatagggaaatctttgataatggtaggtccgtgattttctaccactacgccgccgttaaaccctatcatatagtgattggatttgtttacagcctccaattcctccaaagtctgtttaattgagtaaaagccgcgtccagtggctggtgcaaatatcagcccttgtgcttcggccatttttattgtttcctgcgtcctttttgaaacatgccgacttttatctaacaaggtttcatccaagtcgcaggcgattaatcgatacatagaagagcctccttcaatttatatagtcctcattatagcaaaaaccgagtgttcccactcggttttcggtgaatcatatttagtttgaatgaaattttcgattataaaaactcagactggtggtcatcatccaagcagcaagtaagcctaacaggctaccgattacaatgccgagaaaacgaaattgaatcaggctgtagagatattgctgcttcactagcatggacagcatcaatgacatcggggtggtaaagaattgagcgatcgcgtaattgcgcttcacaaaatattcaactgttacaaataagactgtgatcattaacagtgtttcgaaaattgataaaggtagattcagcaaaaatgcagcgatcgctagaccaataattgtaccgaaaatacgttggatattatggtgagccattgcgcgaagattatctccttgtaagatagcggcgcaagaaacaactagccagtaaggatttttcagctgcaagcccatacttaggtagactgcgaaaaaaaggatgccactgtatagtagactatcgataactacagccggatcttcatcaattcgtgacttgagtgctttttttgttttactgataggcaagggttctttttctatgaaatgcataataaaagcccccgccaaagaaaatagtacaccgataaaaaaatagctgctcattactgggattttagccaatgggacattggtactaacgcccattgccgtgaccataacaataaaaaaaggtcctggtttagcaatgccatacaaacggaagaaaaagcgtcctaaaaaaacgaccaccgcaacaataattggtgcgatccagacagcatgagttgagagcatgccaagaaaattagcggcagtcaaaaaagtacctactattgataaacgtaacattaattgttttaatggaagtcgttgataataaagaaaggtgaagatacctaaagaaccgtagctagagattgcgagctggtggaataaataaccggtgaataacacactgatcatacaaaggccggcgccgattaagcgaacaggtgattcctttggtttgttgtaatgaatcaattctttaaaaaaggattgttccatcctatcacttccttctataaataatggattaagtttttaagctatgtatgtattaaagtaagaaaaaaagctttaattacaggttagcatacaaatcaaagaaaactcaatagaaagtttctgaaagtaaacagaaatgagtcttaagtggttgacaacatgaagtttagcttgtatactattaaagttgagaaatgaaagcagaagcacccgcttctcgccttacgcgaatatctcgctgggctagatagttaatgacgagtcattttgatgagtcgaactacgtgcgggttcgtaaagaactcgtttttttatttgctttttttctctcaaaaattttggaggtgaatgaccatagcaaaggatatgatggttaacgacggcattcgtgcacgtgaagtacgtttgatcggacaagacggcgaacaattaggtgttaaatcgaaagtagaagccttaaagattgctgaacaagcaaatctggatgtagtcctagtagctcctggtgcgaaaccacctgtagcgcgtattatggattacgggaaataccgcttcgaacaacagaaaaaagaacgtgaagctcgcaagaaacaaaaagtgatcaacgttaaagaagttcgcttaagtccaacgatcgacgtgaacgactttaatacaaaacttcgtaatgcgcgtaaattcctggaaaaaggcgacaaagtgaaagcttcgatccgcttcaagggccgtgccattacccacaaagatattggtcaaaaagttcttgatcgcttagctgaagaaactgccgatatcgcgacagtggaacaaaaagcgaagatggacggacgtagcatgttcttagtgcttgcaccgaaagagaagaaagactagcaataattttgagaatgcttctttgactctagttaaagagtatgcgaaatgaaaagtaggaggaaatttagtcatgccaaaacaaaaaacacatcgcggtttagcaaaacgcgtaaaacgcactggtaaaggcggtttgaaacgtttccgcgcgttcacaagtcaccgtttccacggaaaaacgaaaaaacaacgtcgtcaattacgtaaagcgtctatggtttcaaaaggcgattacaaacgtatccgccaacaattggcacgcatgaaataattgcgcaacccgctttacaacttaaaaaattcaatgatttatatttattaggaggaattaaacatggcacgtgttaaaggtggaacagtaactcgtaaacgtcgtaaaaagacattaaaactagctaaaggttactacggttctaaacacactctatttaaaacagctaaagaacaagtaatgaattcatacaactacgcatatcgcgatcgtcgtcaaaagaaacgcgacttccgcaaattgtggattgcacgtatcaacgctgcagctcgtatgaacggcttgagctactcaaaattaatgcacggtcttaaagttgccggtatcgaaatcaaccgcaaaatgttagctgatttagcagttaacgatgcagctgctttcacagcactagctgaccaagctaaagattcattagctaaataagcttataaacgttgataaatcaacgttaaccccgcctttattgagcggggtttttcttttgacccagagattgacccagatttttaccattcttcatataatttccgaaaatatcggcagtttcttctttgccttcttttgttacatgggcatatacgttcatcgttgttttgatgttactgtgacctaatctagcttgtacttgcttcatgcttgcaccagcttcaaacaataaactacagtgcgtatgtctaaacccatgcggcgttatccgtttcagtcctttatgatgattatagaaggttttcaaccatgtttgaggcgttctagggtagatatatccattatcctcaatttttgagaaaacaagctgattgactgatggtataatgtttagcttccttaattcctctttttgtttgatacgccaaaactttagtaactctatcgttgagctatctaaactaatggttcgattacttgcctttgttttaggttgttgaatcaataaagtaccatttttaccagtagcaagggttttatcaatagtgattgtttgactactaaagttaatatcacgccaagttaatgccaaggcttcacctttacgtaatccagtatatgcgagtacagagaacagggtataacattttgctgggaaattatctttcatcttttccaaaaaatcgagcagctcatctctatcgtaaaaattttcttcttcaatatcggttgagttgctactgactgatggtatttcaattctttcaatggggtttgttttgatctcatcaattgaaacggcatacttgaaaatcataccagcataattaatgtaccgttggtatctattaggatgctcagccgcccattggttcgcttgtttttgacaagcagtgactgagattttttttatcttatagctcccgaaagctggtagaacatgcttatcaaaagcaatacgagtgttccagtacgtgctttctttcactttttgcttgtacactaattcaaaccaatcatcaaatacctcttggtaacttcgatttgtggagcgcttgttgattccaccctcagcaatttcaacatctagtcttaatagagctaattttgcttctttgattgatgaaaaacctcgacgtgtcgtttctttctgttttccagttaacgggtcaacccctagatattttttgaacatataggcggttgatccgtctttttttgtgtatttttttatctgtgttgccatgtgttttcctcccagtacctaacgtggggcgatgggtatgtagggagggttgaccaatattggataaggtaaaaaaataattctaatcttcatttggtgcatcaggcaagcttttcataaattctagtatcttattgagctccacatgatcaattcgttcagattgtttcaaaaattctagggtttcttttggagtagcaccatagaatccatcttcggactctaataaatcaatgatttcagcgatagtatcattatctttttttctcctctcagaatacatatttaaaattttgtgatcggaggcgacttgattagtaatagtgaccgctgaactatataaatcaggataatccatttttataacatcaggatgtgtagctatccaaaatcctaaattaatagctgtagaattagacatgctatcaaattttatttcattatttttaaatttggatattaaatcgatagcgtcatcgttattttctattggataatcgcgcttattattttcgcacatcaaatattctaatgagacattgaaaaaattagcaatttcaatcattaagcctaactgaggttctcttttaccagtttcgtattgacttaacgtgttatctctgatgtttagctttttgcccatttgtttaagagtcaatcctcgttctcttcgtaattcaccaattctattcttcaaaaaaacacttcccttattttggattcataaagccattatactaaaatttttactttattccactgaaaattcacattttgtgaatttctgcttgacactcacaaaatgtgaatgatatattgtgactcacaaaacgtgagtggaggtgatgagatgtttgaacttaattcagaaatggctgcaaaaataagagaaaggagagcacgcaagaatattactttaacagaagcagctactgaaattggtgtttcagctaagactttgggaatgatagaaaacgagcaactaccatcagtccgaaaaacagtctatacaaaattggttgattggctggtcaacgaaaaaatttataaggagggctaagcgatgcaggaattagtttttattgaatcagaagacttaaactgtgagccattcactactgatgagatcatagcggagttttccggaaatagtcgtgatagcgtcacacggctaattagaaactatcaagatgatctaaaagagtttgggaagctcggatttgaaatccgacctatgccaagcggtcaaaaagcaaaagtattccatctcaatcagcagcaagcaactttgctgataacttaccttgataacacagagccagttcgattgtttaaaaaagagttagttaaacaattcttcgcaatggaatttgagttgaacgctagacgtttggaacgatcaaacggcaagattaaacggatcaaattaactgatgcaatcaagcaggcagggttcagcgttcatttttacaaacacttcactgatttagtctacaaaaaggcgttaggcttcaatgctaaacagttacgtgaggcaagaggagcaaaaccaaaagctacaccgctagattttctcactactaaagaacaggcggcagtcaatcagatcgaggagttaacaacaggtctaatcttgttaggtcgctcatatgatgatattaagctgattctaaatgttggggtagttatctatcagacgacactcaaaatacctgagaaggctcattaggcgggtgatcgtatgaaattaagtattgatgaactagatttatcaccagccatcttagagatggtcaaagaagccgctgctgaagaaggcaagcaacaggcgattatttttattgatgagtataagaagaagctagaacagcctgtagcgatgaattacacgcaggcggctaaatatctgtcaacgagttacaacacgcttaaaaagctcattaacagtggcttaattaaagtgattttggttgatggatacgaacgcatcagcaaagaagaagctgatcgatttttaagagacaatgcaaaataattcctagcgtggggcgaaggaaaattcctcaatattgagggcacataagttgaaacgtcactaagtcaattgttagtcactaaagttaatcgttcataaaacgaacgaatgtaattgtccaataaatggacgaattgaatagtgcattaaatgcacgagttaggaggaatttatcaatgaaagtcatttatccgccgttggtggaacaatcgtatcaatttattacacaacagggaattaaggtatctaaagcagaagtgtatcaaatgatggttcaagaaggaatgctgacacaaacaggcgagccgactaagaaggcattggagcaagggattgtcacagaatacaagcaacaacatcgcaccttgaaagaatttaagcaagagtatccgatattcaaggggtatccagtcaaagagtttacgcaacaagatggtatttggtatgtgtctcaagatgtgattgcagatattcaagcgattcttgatgcgaacaattgtgacgttgacaccttcaatcagatcaacacgtatttcaatttcagaaactacgataatccacacggaagtattgcagaaattaaaggtgtttatcatccgttgtacacgccttatgatgattcaatgttccagtttgttaatggacaagtagcaatcccaaaagaagtcatggcggatattatccagcgatgcgatgaaggcaagctagatgttgatagagataccgtagaaggctttaagcacttgttagcacaaatggaacaggagtaatgattatgatgcaggacaaaagaaaaaagccttatcacactcaccgaccaaagtagttgtgataaaggcactaacgtaggcaatacgcctgtattcttttgtccttcaattatagcacatctatttattggaggaaattactatgaaaaaaagaactaatttagtaataggaagtattttaatcggctggattctcagcttgttaccgttgatagcaaaattatttatttttactggtttagcagtctatctgttctttgaatacgacgaatgggcctataaccgtgatcacaaacaatctgctggaggtgctgagtgatgcatattttagatgtagggacttcctataacaataatctgaacgatttctttctacacaatagaatggctcatagtggcttgactcaagctgtcattcaacgagtctgtttggatcaggggatagattggcatgaagtagatattatgcttgctttagaagtcggtacaaggatattgagtgagttaaagcaaaacaatcgcatcacctatacagaaaaagaacttgttactattcaaaaatatgagaaacaaatttcttcatgtaaagagacggtgactgcaaatgtttaaagccggcgatgtttgtaaagtaaagaaatcaaaatatcttgcaccagggtcacttgtaaaaatattgctagagcttcaaacagacatttatctatgtggcaacgaatcaggtaacacgattgtagttgctgaaaatttagaatcgttggaggttgtagcatgaaaattcaaagtcaaggcgaaactagaatgaccttagaagaatatttcggtaaaaaatgtgcggaatcaatcaagagtttatatgagcttgcgttgaagtctgatgctcctgatcgtgaaactctagcgacactcttaagagaagaagcagacaaacaagcgaaagacacagtatgcattactttacttcggatagctgaatgcattgaatcaatggaggtgtccgaatgattaaatcagccttacattatgcagaattaggattttcagtattaccactacaaaaaaacggaaaagcgcccatcactacagaagcgtttcctagtgggtttaaatcagctacgacagataaaaataaaattcagcaccattggcaaaaatacccatcttcaaatattggactacggatcagtgagaacttaatcatcatggatattgatgttcataacgaaaacggctttgatagtttggcagtattagagcaagaatttggcaagttaccggatactttttccgtggatacaccaaccgacggaaaacattactacttcaaattgcctgatggtgtcacgattgatcggcagataaacgcattcaaagggattgatttattaaccaatggttacgtcgtagcgagtccatcgtcaattaatggcaagaaatacaccgtttctagcggttctatcgataagctggcgtatttacctaactggctgctaaaagcttttgaaacacatcgagaacaagcctctagtgagtatatgagtcaaacgaatacaaggcagtacaaaccaggtaaaaaatatactggtgctttactcgatgaattagtcgctggtgcaaccgttggcggtcgtaatgaatggatcatgcggatgatttctaaaatgttagctgttggcgcggaactagacacgatttatcgcttgctactggtggtcaacgataattttctatcagaacccttaccgctatcagaaatcaacgccacattcaaaagtcgtgtaaaaaagcacacgagaggagcgtagctattggaagaagagatgtcacaatttattgccaaggaacaagaaaaagcggataaagtcgtggaattgaaatcatggcaaaccaattttcgaaagaatagtaaggaagctcccatagccaatagcgtgtttaatatcgaattggtattagaaaatgacttgaaattaaaagggaagctagcttttaatgcttttacatttgaagaaatcttaactgaaaacctgaacctggattcgctaaaaataccggctggaacgattgaagattcatttacccatgctttaaaaagctatatcgaaaaggaataccgcttcgtacctaaagagccacatatacaaagcgctgttatcaatatagcaagaaaaaacagcttccacccgatcaaaagttatttagagcaagctcgctcaaagtgggatggcaagcctcgaattgaaactttgcttcatacgtatttaggagtggaacaaagcgaatatgcctttaaagggatgctgtgcttaatgttaggtgccatccagaaagtgtatcaacctaaaggaaaattcgatttcgtgtttgattttgttagtggccaagggtcggggaaaaccacttttctgcaaaaattattcttggaggataaagatttttacacagatagtttttctagcttcaaagaaaaggacgactattctattatgcagcggtgctggtgcgtgaatgatgatgaaatggctgtatcagataagacgagcttcaaaattctgaaaaaatttgcatcgcaaaaagaattagaatatcgattaccttacgctagacgatccgtcagacgagctaaaacattcgtattggttcgtaccaacaataatgaaggtcatttaaaagatcgaacagggaacaggcgctttatcccatttagagcaagcaaagaaaagcaggtttatcatccgttagatcgcgaagggcacgctataacaagtgaacttgttcagcaactatggggcgaagcaatgaagttttatgaagagattgaccgcccagccttttatgtcgacctggagcaaatggctgtagaatatcaagaagaatttttagcagttgatagtattgatgagatcgtttatgcagtgctagaggtaccggtaccctatgacttttacgattataacgacgatcagcgagctagttacgtccaaggttacttatccaataatggtactcgtttcactattgggaatagaccagtgaatatcaaagataccaatttgagagatcgtatccggattaaagatatttcgctcgaagggttcaacgaacagtacggaaaaaataacaagagagacaataaaatccgtttaattatggataatcaccctgaatggtataagtccacgagaaacggattacgatttggaaaagtgaaagcaaccggatatattcggaaacacggcagacaagcagacagataagcagacaccaagacaggcagaaaaaacattgttatatcaatgataatcaagctttgtctgtcttgtctgttactaactaggagtagaactattaaaaaaagaagtatgcgtatatatatgttggaagaaaatacggcagacacggcagacaaatagggttaatcgtatgtggctctaagggatgagatgtctgcttgccccgacagacaggcgcagacgtggcagacactagaaaaataacggaaggaacgaaactatgcaaaaagaactgaacacgcccttgttgggattaagtgaaaagcaactaaaggaacgctgcacgaagatggacaccgccaagatcgcccatgcgtataatcaaatggcgaccagcgcacaagaattatttactacttcatttgacttcaagaaagtagattgtgagtatcttgaattaacaattgaggaaaacttacttgaagtgagaatagccggcttgatcgattgtgtgtatatttctataggaatatgggaagggaacaaccattctgtggtctatcgtggttcaagtatcaagacaagctatggtgtggtgaaacaattaatcgaaagcacccgacgaaacctgacattttaagagcgaaaggagaacaaacagtatgaaccaactatccatcatcgaaagagcagtagctgaattactccccatcggtggggcacggaagatcaatattacggatatcactaagctagtagacctagaccgtcgcgaagtctatgcggttattcaatcactaagaagcaaaggcgtgccgattgtagcgactcgtggcaaagaaggcggcatctttgtggctaccaatgaatcagaacgcctacaaggcctacatccgctgagaatgcagcatatgactacagaagaaacgatccgcaatattgagcaagcagatttagaatcatggaagaaattgctagcataaataaagcgtaaccaatgtttcaatctggtatgagtaaattgttaatgattgttaaggttcacaataaaaacagaatcaattgaaattgtaagggatacagctattgagcgaaggaatttatctaaagctcagcgagtagatattgttttaagaagtgatgatttgattggcaaaattcgcaatcaagcgaaagaaaatcaaggtacacgcaatgatttaacttctaggtccttggacccaaaagttaaacaatatagcactagaaaaaaattagctgatattgcagggataagtgagtccactatgaaacgagttatgagagctaaaaaagaagatgaagaactttataagaaagtcgtatctggagaggttagtccaaaaaagtcccaaaaaatttgcggtcagcatctgcaggtccgcacgataaaagtggcctgtaaacaaaagtttagacgacattgctttctccgtcgggatctgttgagcccatcggagaaagcaatagaaatacgaccagttagttgcctataaatcgcaggttagagacatgccccagcttatagatcaaattgaatcggctgatttagagggatggcgcacatcgctgtaagagaataactagcaaaaaagtacgataagtattggtttctctaatgatttaggcaaattctgcatctatggtagcaagtgcaacaatgagattggtaaaaaagtggtgaatattatgtcgaatgttcgaacagcagaaaactattttagcattggtatcaagcagtttaaagaattactgaagatcggtaaaacggtgagatttccatacacttttactaggagccgaacgcgtggcggagagaaagaaatactccatcaagaagaagtcgaagtaatacttaacggggaaacgaactacatgtttttaggcggccgtagaattcttatagagacgactccttgcaactatggtaataagcgctactggtttggttgtccgatttgtgaagggcgaaccactaagttatttcttcatggtggagcttatgcaatttggaaatgccgaaaatgtgcaaatttggtttatcgtagccagcaagaaacaaaaggcgatttttggacgtggtatgacaaagctcaagcgatcgctcgggaattggattcggattattgggaggatggattttcttatttgtgttcatctccgcatatcttattccctaataagcctaagaatatgcattggagtgtctatgaaaagaagcgaaagaaatttttagagtacgtagcccgaggaaataaaatcaatgcggcgcaacttggggcgatagtcaataaacatcgaataaaggagtagatgaaaatggataaagtatacatcgataatacccagtataaagaagcgatagaattccaagttatggtaaagtgaaactgatcgtaaaaaaggttgcaacggagcacacaaaaaaagtgtacaggattactggtgcaataagtattagtccgtgtaacgcagaacgcaacgtgcagttttcctctagggatttaggcagaaaatcggagtgagtagaaatgaatgaacgaactatcacgcaatacccaaaattgaatataaaagaagccactaaagtaggggaactgctagaatccgacgtgttccttttcggaaaaatgttcactatcgaatatgtggcaagcaatctaggcataggtgttgttccgttctttgtctgtccggagtgtcagcagcggcgtagagacttatacaaggtgcgtaaagaatggaagtgctgtaaatgccacgatctagtttatcggagtcagcaacgttctaaaaacgatgggtggtattggttcaatcgtgccattgatcaagcaagaaagatcgatgaagatttccgatttaacagtttcagcgagctattaaaccatccgctcatgttcccgatgttcaagcctaagtatatgaagcagtcaaaatacgacaatatccgattttggtatgacatgtacatgtttcgtagtatgaaaattatggcggaagatatgcgcaaaggattggcaaggatgaggagaggaattggtatacaagataaggactaaagggattagatttacagtaatttaactgtttgttgatattcaaattttaatggtgttgtaatcgttttatctaaaaggtataattccgttggtatgatctttttggtatgatctttttggtatgatctttttggtatgggcgtttggaggcgagactatgaacaaatttctgacatgatgttgagtaaaatctattcttagagttgctaagaccaagtttcgttgttttatgaaaccaatagtgaagtatctcactattagactagtgagaaaagacgagagagtaccattagtaaactacctttttagacatactgtgcgttcaaactactaaataaaaagtatggtaaataatatgcaaaatattgattggacattttttttgaaaacaatcccgatagctttttcgggtatttatgtaacactttatgtatcaatagtagcttttttgataacggttgttttttcaactattatatctttgattcgttttttcgatgtacctatactgagcaaaatcttaggtgtttttatttcatttttcagagctactccttttattgcgcaacttttctttttatattttgggttgagacaaataataccaatctttcaaggactatcgccaacttgggttttgataatggcattgatgttaaataccacagcttttatggctgagaattttcgagctgctattgaggcggtagatataggacaatttgaggcctcatttgctatgggattgacatatttacaaacaatgagaagaataattttgcctcaggcttttaaaatagctttaccatctattgggaataactttgtgatgctttttaaaggagcttctatgggatttacaatcggtgtgatagatattttatccaaagcgaaagttgaagcttcattaacgggaaattggtttgaggcctatttagtagctatgctaatctactggggaatcatattaatttttgagcaaattcaaaaattaatagagcgaaagttatcgaaaagttaaggagcacaactatgattgaattaagaaaccttagcaaaaaatttggcgaaagaactattctaaagaatttatctatgagaattaatgagggtgaaacgatttctattataggcccctctggtgcaggtaaatcaacttttttaaggtgtataaacctgctagagacacccgatagccttgaaatggatattgacaatttatcagtatcagttccaggcatctctaagaaacaaactttaatggttcgcagaaaaacttctatggtttttcaacaatataatctattcaaaaataagacagctattgaaaatgtcatggagcctttaattactgtaaaaaatctacaaaaagaagttgcatatgatatttctttgaaggcattaaaaagcgtgggaatgcaagagaaaattaattcgtttccgaagcagttgtccgggggacaacaacaaagagttggaatagctcgagcagcagcaattgaacctaaaataatgctgtttgatgaacctacatcctcgctagatccggaatcaattcaaggaatattagagctgattaaagaacagcgcgacaaagggtatacaatgttgattgtaacgcatgaaatgaattttgcgagacaggtatctgatagaatatttgtgatggaaaatggttcgtttattgaatctggtagccctgaagaaatatttaatagatcagataatccacgtattaaagaatttttaaaacaagcagattaatgggggatttagaatgaaaaattataaaaaaatagtaactacaattatcgtagcttttacaatagtatttgtattatcaggttgccaaaaaaaagattcgaaggagtctgattcaactgaaaaaaaggatccgcaaacaattaaagtcgctataaacaataacgttcctccattttcatatatgaaaaatgataaagttgttggagcagaagtagatatttggaattacattggaaagaaactagataagaatattgaatttgatcccgctggatttgatgtattgtttggtaaaatcgataataaggaagtagattttttatctagctacttggctattaatccaacaagaaaggaaaagtataattttactgaaccttatgctcatggttttatgaaattacttgttttgaataagactaaagatatttctggtttagaagattgtggtggaaaaaaagttgcggttactgccacaagtaacgctagggagttcttagaacggtacattgaggaaaagaaaattaacattgaaccagtcatttttgaagataaagacaccgccgctgcagcactaaataatggtgacgtagttgggttctttgaaggagcaggaaccaatatagcattgattcaaaataaagtagtggatggaaaatttgtaggcaaatctgaagatatcactgatacagcattcttatatagaaaaggtgacaaggagatggataaattaggaaaagaagtctctgatgttattattgaaatgaaaaaaaatggtgaattgagtaaaatttatgaaaagtgggtaggtgtagatattactgatccttcagcagatatgagttatatttctaaataaattgcattggcggccagagatttggctgccttttttatgagagggcgtgatcgtaatgcaaccaagagagaaaagaagacgagttgattgtatgctgcttgctttaagcacaaatgagtaccgtctgaaccgttctgctgggaaaatagcactaacgatcccgaagaaacgaggcgcgccgtacggcaataagaacgccatagggaacaaaggtggcggagcacccataggaaatataaacacagaaaagcatggattttataccaattttggttatcgattccaaatgatgaaaatagaagaatcgcttatggaaagtggccagtataatgttgaacttgttcgggatattgcggagaaagtaaaaagcggtgaggttcgaataaagtttgattttagcccagggggataattcccgaggcgtgaagtttgaaaataaatctatttgaagatacctgaagaacggtacactaaataagcctaccgttttcaaaatttttgaaatggaagacaacgagtctatttaggaagaatcaacgtaactttggtttaagcactatctataatggtatatccgcgttttcttaaaaggtccagagcttgggattgcgtcagaactttctcttctttcgcaggttttggctccagatatcctttagcagaatagggttccacctttgataagacattccagatagcggtcaggagcatcttacaaatagcaatgatagctttcttgtgtccacgattcgctttgattctacgatagcgatttttaaattctggatgttctttggatctgagaagagcattggcaatctgtacaagtagcggtttcaacgactgccctgcacgagagatacgtgttgattttgttcgtcgggcactgcgatcgtttcttggacagcatccagcccaagaaataaagtgtttcgaagttggaaacacggacatatccggtcctatttctgaaagaatcgcaatcgctgttattggctgagtgtctaagcccggtatggtacgaagtagttccaaaacaggggagaagggttctgcaagagcttgaatctctagattgatctcttctcgatgcttctcaatctcgttaatatggttgaggcattggcgaagcttaatcgcttgaggtacagaaatcgccccctcaactgccgcttggatttcttcaacgggagttttacaatgggcatggataaatggtcgaacatcaaatgattcaccgggatgttctaacaagtattggatgatagaagtggatgattttccgaacacatcactaaaaacatcatctagtttcagattagaaacggttaagcagtttaaagcacgattcttttcacttgttttcatgttggtcagtttcgtccgataacgcattagatcacgaagctggcggatttcaagaccaggaataaaactgggtttgatcatgtcgcacataaagagatcacaaatccattttgcatctttgcgatctgttttatttcctttctggggtttggtgtacttcggatgagccagtgtgacaaaacaagttttttcaagaatattaaaaacagggatccaaaatttaccggaagattccaaacacacatccttacagttgtatttagcaagccattcagctaattcattgagaccttttgtaaaggaagagaagcgagcttgcttatacactgtacgaccattcgcatctgtgattccgatacacgcatagatccacgttttgtggacatccaagccacaacaatttttacgaaagattttgaacatagcaacctcctgtaaaaaaatagtacaggtttggtagggactggtcatccggcgaaatcgagtcaacttcggaagagataagtttacgggctacgggtttgcgccattcattgatgccttaacggatgaccgacaccatataattatgcggggttgccgctatacagccccgccactcacctcctcgggttctgtagtgtaccagggacctgcaaggaaagggtaacacggaataaaaaaagaaagaaggcgctctaaggttttcatcacctcattggtgcctttcgtaggaaggcggatttataattatgataaacggacgtatttagtcatgtaagctatagcgtacaaactatttagttttctttagttgtgtgggctgtttaaattggcgcacaagcttatgtatcagccgccctgagtgatttatagcttcgcagactaaaagtagttgttttaaaacgacatcagattcgctgtgattcaaaaccgtaacagattttttgttgtcacacagagtgatatcagttcgttatgaattagagccagatcgaatagatagctactgtagttctaaagtcacgtaacgctactttagaatatccgtcaaaagggtgtcaaaataactcgtagtcgatccgaacggccactatttttggttatatctcagaaggataaaaatgtaaaacagatggggctaaatcattttttcctgatcaatcaaattgcccctagaagtgcgtaaaaaagaacctactgtttccgcagcagactcaaagaatacagtcgttgaaaaggtagtttatcatttggttatatggctggcaatacaaaaatacccccgaactgctgggttcgaaggtaagaaaggaatttctaagataaggttaacatcatccagatacgcttgcaacataaaatagaaaatactctgacaattcaaacggtatttggtggtatttaataaaacttttgtcagtattgatatacttgtgtacaattagttggcatcattattcttgttcatagtaaggagctgctatatgggaaaaaaactttcaataaaacagtacatctatataggatcaatgctttttggtcttttctttggtgcggggaacttgattttccctgtaaacatggggcaattagcaggaagtaatataattttagctaatctaggattcttggttacaggcattggattgccatttttaggtataatagcgattggtgtttctcaaagtaaaggtgtttacgatttagcgtcaaagattggcagaaaatatgcctttatttttactttcctaatttacttggtaataggcccattttttgccctgccacgcttggcgacaacttcttttgagattgggatcgcgccttttgtttcagggaagcatctagtttttgctttagcaatgttcagtgtgttgttttttgcaacgacatggttattttcgcgcaaacctacaaaaattttagattatgtggggaaatttttaaatccaattttcttaattttattaggagggctactttttttaggatttacgcaaccactagggtcaattcgagcagcaccagttcaaccggtttatcaaaacgcaacttttttaaaaggatttacggaaggttataatactttagacgctttggcatctttagctttcgggatcattattgttactacgattcgttctatgggagtaacaaaacctaatcagatcgctagagatacgattaagtccggggctattagtattgttttgatgggtattatttacaccttgttgtcctatttgggagcaatgagtttaggcaaattcgccattagtgaaaacgggggagttgcattggcacaaattgcgaattattatctcgggactgcaggaagcatattactcgcagtgattgttattttagcctgtctaaaaacctctattggcttagtaacagccttttctgaagcttttgttgagctattccctaagcgtagctaccgtttctttatcattctttctagtgtgctaccgtgtctttttgctaacattggtttgaccaaaataattgaaatatctttgccagtactgatgttcatttatcctttggccatgacattgattttattggcaattatgagtccattatttaaacacagaaagcttgtttatcaaacaaccacgtcatttacagttattgcagctctttttgatgctctagcagcaagcccatcatcacttttaactattcctgcgatagagtcattgctaagttttgttggtcaatacctcccattttttaatataggtatgggctgggtattgccagctttaattggattcttgataggattaatatattcacgatttaaggaaagaagcctagttagctaaaattattgtcaagtccatcatttggattggcttttttggtatactagtttatgcttgtaaaatggatgactaggggagaataacatgcgaggaaagctttcaaaagaccagcgagtttatcaatatgagtcgccttttttaatgcaaggagaaaacggtttgactttaagtaaattgaggtcaatttttataagaagttttttgaataacccacaagcaaagtatgtttcagaaaattacgcacttgaaaaagaacagcgtcaaatccgtgtttggcgaaaagatggaaaggttctttcggaagatgagatacttaaattagacattgttgttcctcaaatctttgagatgtactaaacgatcaaatgatctactactagacaggattattaatagagtatgaggagttaacgcgatgaattcattaataaataaatttaggcagaaatataaggacagttacttattaagaactgttttactcgtaactttagttgcaatatttgtgtcgggatatgatgcattattcaaaaattttagctttagcactttacgagtatatgttgtatttgtcgctatattcattttcttctatgtaatgacaatacggtatagaatccggttgttttaccaatggattgcgggatttgctcttattttgatgtattttataggatcaggttatcttaataaaagtaccgtcgactggacaagttatgtgatttatattttaacaagtttagctctttcctttttgctgatgttgatacccttggcaataaaacaagaccacaaataatgataggtatgataaataaaaaatatcttggcgttggtggtctgtgactgtaagtgaaactatgtatagcgccccacgctagatgagaaatttttgactaagaaaaagtaataattgaatcaatttgacccagaattgacccagattgattttaaaatctgtgaacgatagtaaaagcgtaatcagctaaatttgttgatttaacagcaaattgttactcgtacaaatttcaataaaaggactttgcttgctgaccaagctaaagattcattaaataaataaagcctataaacgttggcacatcaacttatgagctgccgtcgtttattcgtgaaaaggagctgattcaaaagtctaaagacttttgggtcagttccttttttggttattaaagggagtatagaattttcacagaaaaaaggctttacaacagctatatccatgtccggcttcacgaacgagcttttcttatataaggaaagctaactaatgagaagtacgaatgacagatggaatactttttttaaatagctattcagaaattcgataaactagattgattccaaattatagcgtaaaattaaattaataaaagttatgaaatgcgtataaatgacaatgtgaatcttgaggagagcagtaatgaaaaataaactacagcgcttgctggttatcagtttgctatttatttgcgtttgctttgcagcgtatcaattttttgatagtatgattatcctaacaatctttgcagaagtggtatcttttgcattgtgcgggtatttaatactgatcgacaagcgtcctgctacttcaaaatttgcctggttatccgctattttgttttttccttatattgggattttgctttttttcttagtagggggtaagccaagttttaggcgtttttctccaatacaaaaaagaaatgagcagttattgcaccaatacatgtctcagttgttaaacgatcatccggaaataattaatgagccctacgctatttcgaaagaactgacttatctttctggaaatgaatccttgagaggaaatcagcttacacatttagctgatggtgaaaaagcttatcaagaattactgatagaccttcaaaacgccaagcatcatattcatctaatgtatttcatttataaggcagatgaaacaggtcgtgaattagcggatatattaatagcaaaagccaaacaaggtgtaaaggttcgttttatttatgatagcgttggatcgatcaaattgccttttgagttcatttctaaactgaaagaagcaggtgttttagttcgtacgtatgatttagtgaattctccgtctttgagcactagaataaattggcgaaatcatcggaaaatggtcatcatcgatggtcaaatagctcacatgggcggtatgaacttaggcaatgaatatcgcagccgaacagataaatttaactattggcgagacaccaatctaaaaatattaggaccgagtacgatctatgtacagtatgcatttttattggattggctttttttaaatgaggatgaacaaggattgctgcctttttttaatgagccacaaaattacttcccactagaaaagaattcttccgaagaacaaactgaaatctgtcaaataatttttggcggcccttatgactcagaacgtattttgaaggattcgatcatggaattgtttggaaaggcgaaaaaaacgattcagatagcaagcccatatttcgtgccggacgaggaatctttatctgttatacgtcgtgcagcaaggtgcgggttgaaggtacaattaattattcccggcaaaggagatcgagcgatttcttattatggaaatcattcgtttgtggatcgtctgctgtctgcgggagttgaagtttatgcgtatgatgcagagtcatttttacattgtaaatatctgattgtagatggtctcgtcgcatcaataggctcgacaaattttgatattcgaagcttccatctaaatcatgaaatatccgcctttatatatggaccgagtccgatggtctctgaaattcaagcacagtttgaagaggatgttcgccgatctgaacgcctaagcaataaaagccagaaaaaaagaagagcaatgacgattgtaaaggaaagattaagtgaattttttaccccgctgctttaattgatattaaagcaacggggtgttttttatctttagatgttaaaaagcaggtcttgcagttcctgccattcagtatctaagggaatatcagataaacgataaagatctgatgatgtaagatggagctgcggttcaaaattgtatacgcacaaatcaatctgcagtggacttaacaattcatttgttaatggtcgattgaataaaaaatgatattcaacgtcatttggaataactttttttgctagagccttgtaataacttacagaagaggagtctccagttagcgcaaagagtacttttttcttattatatttttttacctcatacaataaggttaatctggcggcgacatcctcaacctgtgaaaaataatcgtgattttttaaaatatgacaccaaatagaaaatgtatcagagtaattatttttagccttgcgtatcaaaatgcgggagtatttttgaaacagatccgtacactccgtcaatatcgatagatttgtgaggtaggattgaatagctgattttgccttatggttgagtactaaattctgctttgaggcgataaaaaaatttgtaataagcaaatcctgttcagtgaattcttgaataaagtcattggttaagtatgagctgtttgattcataaataatggtatcgacttgtgcaaaataagagaacaagatttcttggttccgattgttttccttaggtacctttgaatgaaaataagtagagaaggctgttttaaaacgatggtagctatctttattctcatatttttccagtattgaagcatcaaactcaataaaatgctggttttctattcgtttttctatgatgaacatccagattgttgctctatagtagtcaaaatttaaatttagatcgtagtctcttttcattttttctaagacttctgttatctcatgatattgatcattatggatgatgggtgcactactttcatgaatggagcgaaaatactggaagaaaaaataacggatatttgcttcgtcaccgactaaggaaaaggtagtggtatcgaggtcaagcctgaaatctttaagaacgtttcggaaggttctgatgtaatttttcattgttgattcggaaatgtataagtccaaagcgtaagtaaccaaatctttcttttcttcatagaaaatggattcgataatgtgaaatattggattatctgaaattaaactatcaatataagtgacaatctcacggctcgggccatatttttcaagggataaagtatgattgaattcttctaataagagagcgtttggcaagttatcgattaggtaagcgacatcttgttgtatcgttttgaaagaaacatcacagagatcgctaaaagtttttaatgacaccgggcgattggcttcaagtaagatttgaaggatttttatttttctttttatagatttatcgactagcaaatcataggagtaggtattcattagaaaaagcccccttatcaaaaagtggtgatacggttccattataatacgaacgaagcctacaaataaaatatttgtcttgatatttataaattattttttgcagatgatttatttctatttaaagcttctttttttttaattccttcagacaaattatttccgatttctagaattagtttatttgtgaaaagcttagctgttcactaaacttactatacaagctatccttgaaattgcttgataattgtaaaaatcatttaggaaaagttcgatagtagattaataagatagagagtcgaaaggagaattatgatgaataaaattgtggtaattggtaatggagatgtcggttcaagctatacctttgctctaatggcacagggtgttgggaataatgtaggtattattgatttggattctcaaaaggttgccggtgatgtgaaagatcttacaaatggtttggcttatgttgggcctaaaagaatttattctgcagagtattcggattgttctgatgcagatttaattgttatcacagctggagcggcacagaaggaaaatgaaactcgattggatttggtgaagcgtaatgcacgaactattaagtcaattgtccaatcagttatggcacatcactttaatggaatatttttgattgccagtaatccagttgatgttctcacccattatgtaaaaaaactaacaggatttcccgcaaatagagttattggctcgggaacctctttggatagcgctagattaagaagtgccattggagaaaaatttcaaatagatccaagagacgtgaatatttatattttaggtgagcacggggacacacaatttcctgtttggtctcatggaaatattggtggtttaaagatcagcgaatggttgaatcaacatcctgaattttccgactctgacttaatagaattgtcagaaaacgttaagaatgcagcatatgagatcattcattacaagggttctactcattatgggattgccatttctttggcaaggattacaaaagcgattttgctggatgaaaattctgttcttccagtctcggtacatttggagggtcaatataatagtaaggatgtttgtattggttctaatgctgttttaaatagatcagggattcgagagatcattgaaataccgttagataaagatgaaatagaaaaaatgcgcttttctgttcagaccttgaaagacatgcagaaagaaatacttgagagtgatagctgatgtaatggaatatttttgttcactctgcggcaagagaaaatattaaaaaagcaaaacctcacttagaaaacaagagatatccatctatgctttttcaagaagtccttccattacgaccaatttttttcacagccgcatagttgtttaagcagatactaatagcctaagagataaccatttctcttaggctattttttattaaatacgccaatattaaaaaaacagtaatgctctcaaacaaattttttccaatttttagaaatagtttgtttgagagggcggtattaatttactaaactagcaccatactcattaaggagttattacgaaaggggaaagggtatgaaagaaaatactactttaagcttaaaagcaggagcgaaaaaaagaaaatccgttgtcgatagaaaaaataaaagcgatacgctattttcttttctattgcaactactaaaaatatcagtggcggtattactattagccattagtattaatttatttttaggaccgcatgatattgccgctggaggcgccagcgggattgggattttagcagaatcagcgttaggaatcgatcgttcatgggtcgtcctatcattgaatgttgttgttttaattttagctgctttatttttaggaaaaaagattttcttcaatacgttaattgggagcttgttgtttcctttagcattacgtatagtaccgatcggtatgctaactgaagatcgtttactatcagttatttttggaagtattgtttttgcagtcggagtagctattttatataagatccaagcatctagtggaggaacaacaattccaccgctgatttttgaaaaatattttggtatgaatccatcactaggactattgtttactgatatggtgatcgtatttatgagtctttatgtttttggtttcgaagagtttttgttcgctattttatctattgggattacttcaatcgttatgaattatattgaaaatggtttgaagagaagaaaggcgattatgatcataagtcaagactatacaaaagaaatacgcgatcaattaacaaatgaattggatagaggtatgacagtattcgacgctagaggcggaaaaaatgattgtgatagagaaatgatcatggtagtggtgactgggcaggagtatccgttggttagaaaaatcgtagatgagattgatcctaaaagctttatgatcacttataatgtggcagaagttcatggcttgggattcacgtatcatccgattcaataataaggaggaaaaataatggaacctatattagcttttactattgtaatgtttatttggacgattggggagtttgtatcaaacaaaagcaaggctttgatttcgatgatgttagtagcttctttgatctttttggtgggttttgcaacagatttattacctcatgatctgattcaggactcaggattgttaggcttaggaaatgctgttattggggtaattatcgttcatttaggaacaatgatgagctttaaagatttgaaactgcagtggaagacctttgttgtaggatcgttaacagttgttttaatgacggtgattctaatctttatcggtgaattgatctttgacagaaatattgccgtagctggcaccgcgtcgataaccggagggacactatcgattttaatggtgcaggaaaaagtaaatgagattcagaatgctggcggcgatctagggattttatctagttacttattagcagtttttccgctcttgatactaaacttaaaaaatttggttggtttcttatttacggcgaatattttgaaaaaagaagcacttcgcgtgaagaagcaatatcgtgatggcgagctgactttttttgaacaggaagtagctgaaaatactacggaggctaaagaaagtattttaccagattttttacgaacaccttatggcacattgtttttactgggcctgacaatgtatgtttctcgatttttaagtcaattaactaatgggacggtaaatgcttttgtgattgccttactattgggaatcattttgcgacacttcagaattctgaagcctaatgcattatcatctaccgactcttttggtttgctaatgatttccatcatggttattgcgtttggtccattagcagatattgttccggcagatctattgcatttgattggtccaattgctttctacttagcagcaggtttggggataatctttatagcgtcattccttatcggtaaaaaggtcggttactctggttcattgtcgattgctgtaggtatgacaaccttgtttggatttccaggaacaatggtcttaaccaaagaagcagctgcagctgtaggggaaacagaagaagaaatcgctgtaattgagcaaaatattctaccgatcatggtaacggcaggattttctacaataacgataacttctgtcattaccggagggttgattgttgggttgatgctgggataagtgtttattgataaaagaggttgattatgaagaaatttagtaaatattttgtgtttgctttgtcaagtgttgtagttgtatattttgcttttttttacagaattcctgatttatatataactaagccgggtccagtagcagatgcaatggaaatggtgtcggtagcagaccacacctcaaaaagtgattcagaaattttggtgacaacagtcaaacgtgaacaaggaacagtatttaagctaatcagggccttgatccatccttatcaaaatctaacaaaagaaagccagaactacgaagcggtaaaacaggatagcagagatgttcagcgggctttcatggcaaattctaaacaaacagcagtgatggaggcccatagacttgctgaaaaggagaaggagcttgattttgttggaatacgagtgatgaatattaatcgagatgtgcaaaacttgaattcactgagaataaacgatgtcattctttcaataaatggtgaagcagtcacacctagcgctctagccttactcccacaaaaattaagggcggcacgaaccgagcttgttgttgcgagggaaggtaataaacaggaactatctatcccgagaattacaagaagcggttatttattaaacggtgtactggcagtgactgccaacgaatcaattagcataaattctaaaggattcggcggaccttcagctggggcgatgttaaccttaagtgtttatcagcaaattacaggtcaggatctgctaaatggaagaacggttgctggtacaggaacgatagaaacgaatggtagtgtcggacttgttggcggaattccgcaaaaagtctacgccgcacataactctcaagcggatattttctttgtcccttatctgggaaatgaagaaggaactttttcaacaaactattttgaagctagaaaagtggcagaggatattcagactgagatgaaaattgtgcccgttggagatatggccgatattattgaatacttggaattgaatggttaagttgtcatttcaagagtatcaaaaataagaaggaggaaaaattatggatacaaaacgattagttaaaacatttattgagttggttcagattgattctgaatcgggaaatgaaggaaaaatacatgaatatttaaaaaataaatttatgaagcttggcttggagatcgtggaagataacagtaaggaagataccggattgggttcaaataatttaattgttaagcttcatggaaaagaccgcaataaattgcctcttttcttttcctgccacactgatacagtttctccgggaaaaggtattgaagtgattgaagaatcagggattttatcctctaaaggagaaacgatactaggtgcagatgataaagcgggaatcgcgattatcatcgaagcgattgaaacaattcaagaactaggcatcacaacaggagatttagagtttgttttttctccaggagaagaaattggattaattggtgcatcagccttagatatgcagctgatcaacgccaaaagtggatatgttttagacagcggcggagaggtaggtcgtgtgactatagccagtccgacattatttatgtatgagattcaagtaaaaggacaatcagcgcattcaggtatagaaccagaaaagggaatatctgctgtttcaattttatcagaagccttacaaaaaattgagataggtcgtatcgatgagatgacaaccgcgaatatcggaacaattaatggagggaacgcgacaaatattgttatggattcgttggtgctaaaaggagaagtacgttcagtattgccagaagtagcagaacaattactcaaggaaatagaagaggcctttagtgcagcagtgcaaaaatatggcggctcctttgagatgacggtagaaaaaatggccactgggtacaatattcctgatgaagcagtgataatgaaaaggttagataaggcaatgcataaacaggatctttccttgataaaggagattagcggcggcggaagcgatgctaatatttttaatgaaaaaggaaaagaagttgttaatttgtctattggctatgaaaaaattcacacgactgaagaatatatagctattgcagaaatggagaaggctgttaaattggtgattgaattggcggagatggcttcttaaggattaatagtcgagagaaattttttatgaacagaggactttcaataaatcgttgaatgagcggaataaatcaagaaaaggggaaagagcatgcttgcaataagtgctattttgttagctagtgtcttatgtttttttaagatcattctaaaatggtggaaaaaaactttttctgcaacagaacagctgatgatctcgttattatttgtactgttctctctattactaattattctttcctctgttcgtttattttttagactgtgaacgaaactagcaatgcctgtactataaattttatgagtggtggggaaaaatgaacgaaattcattcatttcaacaaaaagaaatccaacaagcgcagtttttttatgaatgtgccatgaaggaatgcgaaacaaaatttcaaattcttttttctgaattattaatgaaaaatgaacgctcatctattcaaggagttagctcaagagtaaagaccagtacctcgatttatgaaaagtgtgatagaaaaggaatccctataaaattggatgaaattctgtcgaatatatttgatggtgccggtgttcgggtgatctgctcttatatcgatgatgtataccgaatcagagaaatgttccttggtcaagatgacgtgattttattaaatgaaaaagattttattgaatgtcctaaggcaaatggctatcgcagcctgcatctgattgttcaattacccgtttttctatctaatatgaagaaaaatgttgttgtggaagttcagcttcgtacagcagcgatggatttttgggccagccttgagcacgaattaaaatataaaagtgataataaagatccggcgttaataaatgagttgcgcgtctgttcagataaagcgcatctattagatgatgaaatgatggggctgagagaccgaatcatcgagtttaatcaaaagctagaacgctctaaaaaggacactgagtttagccgttttcttaatagataaagcttgacctcgtgatccggtcgcttagaatcctttctagtgtaaatttttgagagaaagaatgagcatattaggagatacatagaattacttgtgctatggtaaatatatacaatgatcgagacatttaatctaattttagttaatgtgtttttcaacaataatcaaaacacttaggagggaaatcgtatgaaatcactatttaagtttatggttgctagtacacttattgtaggcggcgttttagtagcaggaacaattttgacaacgaagaagatcgacaaatacggcgacgatctgcaaaactttttacactaatctattctcagaatcacactttcttgtttggaagtgtgattttttttaattattgggaaagtacaaaatttccatataaataaatcgttttgcagcaggcatatccatgtctggctttacgaactcgcgaggcatttttcaacacaattatttcaggcttccatgaaattaccgaccttaataattgttatttataggtatacttaaggtatcgaatgaatgatatggaggaatacatatatgaaatggtataagcaatcaattgaagaggttttaactaaagtggattcacaaactacagggttatctaaagaagaacgtgaggcccgtttgaaaaataatggtccgaacaaaatggaagaaaaagaacaagtaaaattatggcggaaaatcgcaaagcattttactgatttattgatgatcgtattaatcgcggctgctttgttgaagtttgcgacaggtgagttggctgaaggtggaattatttttctagttgtgattatcaacggttttgtcggttattggcaagaacgtaaggcagaagaatcgttagatggcttgaagcaaatgatgggacaagaagcgactgttctaaatgagggtcagccgttaaaattggattcagaaaacttggttaaaggggatgtagtgatcctaaaagcaggggatgttattccagcggatttgcgtttgatcgaagttcatgatttaacagttgaagaatcaatcttaacaggtgaatctgaggcagttgaaaagacagtggcggtgatttcgcaaaatgccttagctggcgatcaactaaatatggctttctcaggaacactcgtacagacgggttcagctttcggagtagtagttgagactggagatgcaacagaaattggaaaaattaatcacgcgctgcaatcgatccaagcacaaacgacaccgttagttaaaaagatgcatcaattgaataaacaaatttttagagggattttggcattgatcgttttcctcttattctttacaagttttagatatggaatggattggagcttgctgttttctgcgagcatcgcattgatcgttgcgatgattccggaaggtctgccagcagttttaacgatgatcctttcaatgggggtcaaagaaatggctgatgagaacgcgattattaaagccatgcctgcggtagagacgttagggtcaatgacggtgatctgctcggataaaaccggcacgcttacaaaaaatgaaatgactgtacaggaagtcgtaacagaagaactgccgcgggtcaaagaaatcatgaataattgtcaggacttaaagaccaaagatcatcaaaaaattgaagacatccatggcaatcccacagaacttgtcaagggtcacaaaaaaatgttggttttgggccattgaaaatgtaggtattcggtcttctgtattatttgttttctttcgctttgtcttcgctatagcttttcattctataagaaggccctgtaatttgaatgattttagagtgatggaccaagcggtccaataaagcatttgttaatttcttatttccaaatatttccgaccattgagaaagcggaatatttgtagtaataattgtcgatttcctctcataacgcatattgattaattgaaatagtaaattggatccttcttttgaaaatggtaagtagccaacttcatcaataattaatacagcgtatcctgcatatttcttaagcatagtatcacttgttccacgcttatgtgctcgaatgagccgattgacgagctctgtactggtgataaataagcaacttaaccctctatctatacactctaaaccaatagaaacagctaagtgcgttttccctacaccgctatttccgatgaaaagaatattgtcataggtatctaagaagcgcaaagttactaaatcttggatttcactttttttaatttttggttggaaatcaaaattaaaatcatagagacgtttatgataaggaaacattgcacgtttcaagatttttctttgggtttcagcttttcgataactaatttcttgagacgtcaattcaaataaagaatcgacaagagatttatcacttttggctacctcatctaaatgtgcaggtaaattttctttgacacacgtaagatttaaatctgttaactggttcaataactgatggtaatttgacataagttcctccttataattcatcataagcatctaaattttcctctacaaaccgctctagttcttcatcttccaaatatttgaagacgtcagaccgaagaatttcaagcgaatcatcccgttgataattcaacgctttttcacttaatggatgcgaacgaatacattgatgcccataccagatgaaaaggttgtccttccggacatccagagtcacttctttgccaatatatttcaagggaacagaatattttgaattttgatattgaaccatggattcaatggaaacttttctttttacatgtaggtttctggaaacataacgtaagagttccaaacgatttaaaggaattagaatagctttttcatcattgagcaatttgattggtttggcatttacggcttgagaacgttcattgtttaaatcgtccataaactcatttacaattcttctaagatcttgttcgttttcaaattcataattgaaaaccattaatcgattgaccgttcgagctaatgcttctacctttcctttagtttgtggtctaaatgggcgacaagcaataggattgaatcgcgcatctttcgcaaattgtcggaatttctcgttaaaaacagtttgactaaattgactttttcctcgatcaaccacggttttcatattatcaaaccatatttcttgaggaacaccgtttccacagtactcaaacgcatttactaagcaatggaacacagtggactgcgttctatcaaaggtcacttctaaatatttcatgcgtgaataacccaagacgtataggaaaatattaaagtagaacacttcgccatatttactcaccatcttgatgttttccttccagtcaacttgagctgaaagaccaggagttgtttcaatccgaatcgttgcttttttcacccgttcgtcacgatagtgacgacaatatcgtttgacggtagtataaccacctgtgtaacccatttttttaataaagtaataaatagaagaagcagaacagctcaactccaatttatctctaataatctcttcaaatccagaaagtaaaggagaacttgaagactttcttttttttagctggtctatatttccttttctaccagcttcgtaatagcgtttaacagttctgtaatcacaattgtattgtttagccaaagctgcgtaatttggttgaatatcgttcataatgtggcgtaggactccttctaagacatcttttctcatgattcactctccttgaatgttttcatgaaaaagattatcagatttgaattcagcctacattttcgatggcctttttcctacattttatcgtggccctttacaattagcatgtaaaaagagtgacaacacgtatttttcgttcaatggatcatcagttttaaaagggtctatcggtagatcgatggtacaagtcacagttttggaggaatacacaaatatttatgttaaaccgctcgtaaaatccaactcaactatttctacaacagtaaggtatggtgaggaaaaactaatcaatggatcactcgaagcaatggaagaatggacaccttcgcaagctgacagcggactaacaccgattaacggcggcatggttccattcaatgaaaaagactatgaagacttactttcagatgatggaattgttcgagcagagactaaaatcgtcgggcgtggagctgagattgaaacgccttttaaaattattgaagtatttgcaaatcgatatcctgatattttcgggaaaacaacaactgatgctgaaaaaattacatgctttaaatcaattcaaaaaggtgtcactattaaatctactttgagaggtagtggtgctaatgcttcgaaaaatggtcaactatatctaaaatataccgatggaacgtcagaatttttagtaaacaatcaaacatctgagtttgtagaaatatcaaaaacactgactgctacgcaactagatcaattatcttcaacaggcgttttgacggtctatgcgacgactaaacgaaatggcactaatgacgctggtgcgatatcagatggtgtaacatctgcattattagaagtgaaagatttacgtttaatcgttgaaattgaagcaaacggtaaaacaattatcgagtctataatcgcggcctatcatggagaaaatattgctactcaagaagaggcagaattaggtgaagaaaatacaaaaacgatgactccgctgagaacggatcaatacttcaaagcacatctggcgactcaagaagaagcagaaaatggagtttcacatttaaaaacaatgactcctaaaagaactgcggagcaaactcttgcgagattcggacaatcttttactccatcaacaaaatttatagcccatagggggaacaattacttttatcctgagaattcgatcgctgcattcgaaaagacaagcagacattggggagcagaaacggatatccaacttaccacagatgggaaatggtattgtttccatgatagaaccttagatcgaatgacgaatggaactgggaattttatggataaaacgtcaagtgaaatcgaagccttaagattagatacgggcaatggtattaatactctatctgatgtagagaaaaaaattccaacatttgaacaatatctgaatgcatgtataaaagcacgaatagttccagttattgaaattacacctcttaaaacagattttaccgatgcacaactagattcaatcgtcaccgtcattcgtagaaaagggttattaaacaaatgtgtgattatttgttttacctatgaagtattagttaagatgagacaaagaatgccttatacggtgatgcattggttaatcagcgagtattcagaagaaatgattcaaaaatgtgtaataaataatttcgttccaagttttgattactcgaaagcttctgtgaatcaagcattgattgataaaattcacgatgccggacttgagtgcggattatggacagtgccatatagtgaccatcaaaaatatactgatatgggagtagacaatataaccactgattcggctagcggaaacttaagatactttgagccagcactgcgtagtggtatgttaccaaatagtgttgatcttagcggaccaacttacattgaagaaacctctaacggcgaaatccacattagagttaatgttactggtggtcaaaatgatgtaggggtatacatttgtgctttggaatcttgggcgatccctagacactcattaaccttgattggttatgttcgatcaacaaaagttacaggatttacgtttgtgccagtttcagttggtgttggcggctattcagcgaatgattcgtctatagcagatgcaaatataaaatttggttatctcacgacaggaacgaactgggaacaaagagctacgtatgcggcttttgatttgttttatcgtatctaagcacactttcgagtgtgctttttattttgagagaggaaggggtagtcatgtgggaatggaacttgaagctcaggtaaaacagcacgaagataagcttaagcaacacgacaaagaaatcagtcgcttaaatgacctttcaatagaaatgcaaaaatcaatgaacgaagggcttgctcgtgtggatgaatcaaatagatttttgcgagaacaaaatacgcgccaatcggaacaaaatgctgaaattttgagagaggtcctaaatcgtaacaaagaagaagagaagcataagtacgaactacgtatgattgataagactaacatatggaaactaatcttgggaattggtggtggtgctggcgttgtatttgcattcgtactggaattgcttaaatttttgagggggtgagaataatgcaaaataagacgtttgaaattttgaaatgggtggccgcaattgtcattcctgcgctggcgacatttgttggtgtggtaggaaaggcggttaattgggagtacaccgatatcacggtaatcattatcacagcgctaggcacttttttgggaaccgttttgggggtatcaaatcgaacatacaagatgttttcagcagatgaataggagagaatacatgaaaaagaaaattattgtaggagctattgtagctctttttttgttgccaatttttccaagtacagtacaagcggcgaaaggggatcaaggcgttgactgggctgtatatcaaggagcacaagggaaatttgggtatggctcggataaattttcgattagtcaaatcggtggatacaatgctggtggtttgtacaatcagtggacttattctagtcaagtagcatcgacgatcgcacaaggcaaacgagcgcatacctatatttggtatgacacgtggggaagtatgagtattgcaaaaacaacaatggattactttttgcctaagattcaaacgccgaaagggtcaatcgtagcgcttgactttgaacatggtgcttcaagcaacaaacaagccaatacagaaaccattttgtatggcatgcggcgaattaaacaagccggttacactccgatgtattattcgtataaaccattcacgcttcagtatgtgaactatcagcaaattctagcggagttccctaactcgttgtggatggctgcctatccgaattacaatgtaacgccaaaacctgtctggagtgtttttccgagcatggaaggcgtagcaatctatcagtttacatctacgtatgtcgctggtggcttggacggtaatattgatttgacaggtattacagataacggctataacggagctatcaaagacgatgacggcaaagttactgtgaagcctgatactgaaacgcctgcgattgatcaaggtcagcaagcgaacgaaacgcctaagaatgacatcaaagctggattcaaagttaaagtgaacttctctgcttctacttggtcaaccggccaagcgatccctcaatgggtcaaaggcaatagttacaccgttaaggaagtaagcggaacgaaagtattgctcgatggcatcatgagctggatcaatcgcaaggatgttgaaatcttgcaaacgaccactcaaacgccaagcactactacatcgacacatattgttcgttcgggtgagactctatcaggtattgctactaagtatgggacaacatatcaagcgttagcgagcctaaacggactagctaatccgaattacatttatattggtcaacaactgaaggttagcggaacagcgtcaattagtcgaatatacactgtaaactatggtgaaactctatcagatattgcagctaaactcggtacgacatatcaggcattggctcaaaaaaatggtatttcgaatccaaatttgatttacttgggtcaacaattaacatgttaaaaaacgattgtaattaaatgattaaagagttatagtaaaattgtaagttaccatagcttactttttctttcataactaagtttcatcttgatagcaaccagtcgtgtgcgagctggttgtttttttgtggaacttagaaacatgagtgtatcatttgcaaagaaatcggtttctaggtaacatctactctattgggaagtcactcgcccataaaaaaagggaacgtcagatacagttacttggggaagtggactgtggggaagatctgacgttctatttctttattgtaacacgtttaaaaaataataatactcatttaaagtacccttagttcaattggtagaatactccggttcatatcggaagatgcgggttcgaggcctgcggggtacataaaaagactactgtaaaggtagtcttattttttatattatagaagctttatcaagatgtcgattaatagaattacaattaatagccaaagcgttaaccttttccataatggagttttcccgcggaaaattgttatatcttcatgtattttctttcgaatcttcttaattttcctatccgtcatggtagtcaccttgattgcgttttctttattctaacaaatgatgaggcaagtaatcaatggtattttccaatataaagatatgatctgcataaacttaaacaactaccctctcgtaactctatcataatttttgtttttccgatcacagcatactttttaacaacgaattgttttctaatattataacgccccgcttttgccccgccgaatttaaatcggtatgcattgatataagtagaaaaagcatgacatagcaatttttaaggttcatggatttcgctatatatagctgttttagcttatttaaatcacattgatttatacaaaggccgtgaaagaacagggcatcgttcttgcacaatatcaagatgaatctggtaaaccattgatcggcgacgaagttatgactggtgaggtaggtagtgaatatactacgactcaaaaagtcatcgatggctacgtgtttaaagaagtcgttggaactccttctggaaaatatgtactaggaattacaaaagttgtttatgtgtacacgaaaatacctgctgaacaaggcaaggtgatcgttcattatcaagatgaagagcaaaattcattaagtccagatgttgaattaaccggtgatattgatgatatctatacggcagaggtgaagccttttgatgactatgttttaaaaggcatcgaaggaaatgtaagcgggaagtttacagctcaagatcaagaagttactttgatttatgcgaagaagggttcaggtactgaaaaaggggtactcattgtcgattatcaagacgagactggtcatccgcttttaaatagtgaagttacgatcggtgaaatcgatgaagactatgagacgacacaaaaagatattgagggatatacatttaaagaagttcagggaaatgtcactggaaaatatgtcgatggtattactagagttacgtatatctacacgaaagataaagaacctgagaaattaggtaaccttacaattaagtatcaagatgaaaagggcgaaaaactagcagaagattttactgattcacaaccaatcgggacatcaattccgttggagcagctgaataaaacctttgaaatgaatttaaggaaattaaaggatttacctcaggcgtgtacacagcagaggatcaagaaattacggtgatctatcgcaagttgactgggaaggtgattgttaatcacattagcgattctggtaaagtattagcaaaccctgttttgatgagcggcgatgttggtgatgggtatgaaagtgcgaaaaaagagttcaaaggctacaagtttaaagagacattaggtaattcgactggaatatacacatcagagctgcaaatcgttacttatatttacagtaataaagctacgatccggattctttatgtcgatgaacagggcaatgaattagcacctgccgagcaaaaaattggcatcatcggagacaaatatgaaacgcaagcccaagctatcgatggttggacagtgaaggaaacgccaaaaaatgctaaaggaaactatcaagaaacagagcaaaccatcacgtatgtctaccttaaagagaataaacctgcagcaaacattgaaagtgatacaacaggaaatggcggagaaaatacaaacaactcaaatgctagtataacgacctaccgttccacaaaaatacttccaaatgcaggcggaagcactacggctactagcaaggttctaccacgtactggtgagcaaaagaataatacaacaattcttacagtgttcggattgttacttctgacgattgcttgtgttggcgcaattaaaagaagaagagcttagaatcaataaacgcgatatctaaaaaatgaatagaattatgagtaattcggctgtttatttcctgtagtctgcgggaaataaacagccgatttttgattatattcaacaggtagcaagcacttatctttctcaagtcgttcgattgttgggcagcatcgtgagcataaagacttattcaatatgaaaggcttaaacccatactgcttaaataccggaacttataattgtcaaaataactttactgtttaacaaacggagatttcagcgaactaatctaaacaaagaggcagtcttttgattcaagtaatttttttctatggaaggaggaacttttcttttttattttctccctatttggcgctaatttggtctaaaaatacaaaatctcagttttatatgaaaatgaatctccgttttatttgtaaatgattagaaccagtttttggtgttgcaaacattctgattctgtttttaattaaaaaatcaaatttttattgtgacgaaaagaacatgtctgacaatagaagtatcatccttatattagcctttttttagaatgcggaaaatattttttgctaaattttgttttattgtgaataaagaaacgttatgtattggtaatttcagtatggtaaatttctttcgattcttactaaaaaacctaaatttccaatcattaaataaaattaattagaagagttctaactttcattataattcaagaaattgtcgagtgttaaagttgtaaacggtatcaatcgcttataaactgagtgtgtaagttacgaaagcgcaaacaaataaacgagctgtttcttttcaatgtcagaaaaaataacaacttttatgcgcaataatcagtatggaggagaatcgttatgagttcaaaagttcttgaccaatttcttgaaacgaatttggaagatctaaaagaaaaaggattgttcaacacgatcgatgttttggaaggaagcaatggtccgatcattacagtcaatgataagaagatgatcaacttggcatctaacaactatctaggatttgctactcgtcctgaattgatcgaagcagatgtagaggcaactaagcactatggtgccggcgctggcgcggttcgtacgatcaacggaactttagacattcaccaaaaattagaagaaaaaattgctgagttcaaaggaactgaagcggcaattgcattccaatcaggcttcaactgtaacatgggagctatttcagcagtcatgaaaaaaggcgacgctattttatcagatgagttgaatcatgcatcaatcattgacggctgtcgcttatctggtgcgaaaatcatccgtgtgaaccaccaagatatggaagatttagaggcgaaagctaaagcagcaactgaaagcggcgaatacaacaaggtgatgtatattactgatggtgttttctcaatggatggcgatgtggctaagattcctgaaatcgttgaaatttgtgaaaaatacaatgtcattacttatgtcgatgatgctcacggaacaggcgtgatgggccatggacatggaacagtgaaacattttgaaatgcaagatcacattgatttccaaatgggaactttatctaaaggaatcggtgttgttggtggttatgtcgctggaacgaagcaattgattacttggttgaaatcacaagcacgcccattcttattctcaacctcattaacacctggggctgcgggtgcttgtattaaagcaatcgacttgattgaagagcatccggaatatgtggatacactttgggataatgccaattacttcaaagcagaattaaaacgcatcggttatgacattggtaaatcagaaacaccgatcaccccagttattgttggcgatgaaaaattagcacaagaattttctaagaaattattggaaaacggcgtatatgtgaaaccaatcgtatatccaacagtaccattaggaacaggtcgtgtacggaacatgccaaacgcaggtcatacaaaagaaatgctagatgacgcgatcaaggtttacgaaaaagttgggaaagaactaggcattatcaaagaaaccgttcaataaaaaaatcaaatttaccataaatagagaggaagtcacatccatgaaaaaagtattaatcacaggcgcattaggacaaattggttcagaattaacagaaagactccgcaatgatttaggtgtaaaaaatgttatctcaacagatattcgtacagttgaaggcagtcctgttgttgaaaatggacagtttgaagaactagatgtaaccgattacgaaagctttttggatattgcgaaacgctatgaagtagatactattattcacttagcggcgttactttctgctacagctgaaaaacgtccggcttttgcttggaacttgaatatgactggattgatgaatgccctagaagtagctcgtgaaatcggaccaaaaacgaaattctttgcgccatcttcaattgcagcttatggaccagattgcgaaccagacaatacaccgcaagatacagtgatgcatcctactaccatgtatggagtgaccaaagtagcaggcgaattattagaaaactactaccatgataaatacgatgtagacagccgttcagtccgcttcccaggattaatctcatataaagtagagcctggcggtggtacaacagattacgcagtagatatctattacgaagcattaaaaaacaaatcttacacatcatttatcgataaaggaacttatatggacatgatgtatatggatgatgcgattgaaggaatcgtgaaattaatgaacgcggatgctgatcgtttagaacaccgcaactcattcaatatcactgcaatgtcctttgaaccagaacaaattgccgcatcaattcgccgtcggattccagactttgaattgaagtatgacgttgatccagttcgtcaaggaatcgctaattcatggccaaattcgatcgatgacagtgatgctcgtaaagaatgggacttcagtccaagctttgatttagataaaatgactgatgaaatgttagaaagattatcagaaaaatttaaggcagaaggcatcgaaacaaaagtgtcttttgataaagtgaactcgtaaaacggcagaggtttcttaacagaacatgaggaggaactaagaaaaaaggaaatgtttaaaataacgtttccctttttctttctccatgttaaaataatgtccggacaaataagagaagttattaaatagttgttatatcgcaattttttgttctctttcttttatggaataacttcagctgtttgttttaaagatcaagttaagaagtgagcaaaagccacttcaaaaattaggaggaaaaattatggcagtcgaccaacaagaactcgtgggttcacaaccatctggtgaactaaagcgaacaatgacgttcttcccagctctttcgacagtaatgggtactgtaattggggcgggggtattctttaaagcagccagtgttgctgcagtaactggatcaacgagtctgcacatgttgtcgtggttcctaggcggtctgatcagtgtctgtgcgggactaacgggtgcagaattagcagcagctattccagaaacaggcggtatgcttcgctacatcgaacgtgcgtatggagaattttggagtttcttacttggatgggcacaggtagtcatctacttcccagctaatgtagcggctttagcaattatttttgccactcagttcaaaaatctatttggtatgagcgattcaacgatcattccgatcgcaatcgtggcagcagcttcaatcatgttgatcaacttcttaggctcaaaagctggcggaatgttccaatcaatcacgttagtttgtaagttagtgcctttagcattgattgtcattttcggtttgatacgtcaaggcgatgtgtctgtcagcttattcccagttcaagccggtccagcagttggcggttttgctccagctttaggtgctggattgttagcgacaatgtttgcttatgatggctggattcacgttggaaacatcgcaggagaattgaaaaaaccagcacgtgatcttcctcgagcaattgcaggcgggatcttaggaatcatggctgtttacttattggtacaatttgctttcttgcgtacgattgatatgtctgcgttagctgggaacgaaaatgcggcgatggacgttgctggaaaaatcttcggcggcatgggcggtaagttagtaacgatcgggatcttaatctcagtatatggaacaatcaatggttatacgatgacagggatgcgtcttccttatacgatgggtcttgaaaagcaattacctttctcagataaattagtgaaattaaacaaaaatcacgtaccttatatcgctgggattctagaattagtcatcgctattgctatgatgatggtgggcggattcgatatgctaacagacatgttagtcttcgttatctggatcttctacacattagtctttatcgcggtaatcaaattgagaaaaactgaaccagatttggttcgtccttacaaagtaccgctttacccaatcattccgattgttgcgattattggtggggtatttatcttagtaatgacgttgatcaaccaattccaattagcgatggttgggattgccattacagcattaggtattcctttctacatttacttgaagagaaaatataaatagaaacggctgatttgactcaggactgtaaactattccgacaaaaaacatctaaggcagattttctgctttaggtgttttttctattctattgttatagaagaaaagccgttgccaagaaattaccacaacgatatggtaattgtctgtgttctaaatggaaacgctatcttttatgatggggttagaaagagaaaggatggttgatttatgacaggattttcaaaagattttttgtggggaggtgcagtagcagcgcatcagcttgagggagcttggcaagaaggcggcaagggtatcagcgtagcggatgtgatgactgtcggtggtcctggtattccacgtagaatcacggagggtgtccttgaaggagagtattatccaaaccatgagggcattgatttttatcatcggtataaagaagatatcgcactttttgctgaaatgggttttaaatgtttccgaacctcgattgcttggacaaggatctttccaaagggggatgaggatgttccaaatgaagctgggttaaaattttatgatgatctctttgatgaatgtttgaagtatgggattgagcctgtggtgacactttcgcattttgaactgccatatcatctagttactgaatatggtggatttgccaatcgtaaggtgattgatttctttgttaggtttgctgaagtttgcttcaagcgctataaggacaaagtcaagtattggatgacctttaacgaaattaacaaccaagccaattacaatgatcaatttttcccgtttacgaattcaggaatttcctataaggaaggcgatgatcgcgagcaaatcatgtatcaagcggctcactatgaactcgttgccagtgcaaaggcggttcaaatcggcaaagcaatcaatccagattttgaaattggatgtatgatcgctatgtgtcccatctatccggcaacgtgtaagccggcggatgtattgatggcccaaaaggcgatggaaaaacggtactattttacggatgttcatgttcatggagcttatccggggtatatgctgacatacttcgctagaaaagggtatgatttagatatcacctcagaagatttagccgaattgaaaaaaggaacagtcgattatattggctttagttattacatgtcctttgcgatcacgcataaagaagacaatgtgtactttgactatcatgaacaggaagattttgtcagaaatgaatacctcaacgccaccgactggggctggcaaattgatccagaaggtctgcgttattcactgaattggtttacggatcattatcgtgtgccgctcttcattgtcgaaaacggctttggcgcaatcgacgaaaaagaagccgacggcagtgtccatgatacgtatcggatcgattatttccgtgatcatatcaaagaaatgaagaaggctgtagtggaagatggcgtggagttaatgggttataccccgtggggatgtattgatttagtctctgccaatactggcgaaatgaaaaaacgttatgggtttatctatgttgatcgagataacgaaggaaatggtacgttagaacgcagcaagaaggattcatttgattggttcaaacaagtcattgcttcaaatggcgaggatttaggataaaaaaacgaatccgctgacattcatgcctacgttaaaataagagtagatgaatgtatggggataagaaatctattaaaaatagggaggaaaaaacgatgaaaaaagctttgattatctgtgccggaggaatgtcttcatccgtcattgccaaaaaaacaaccgaaagtctccaaggaaagggcaaggagattcaagtcgacgcgacttcgcaatcccaaggagcaaataccatcgctaaggatgaatatgatttgtatctagttagtccgcaaaccaaaatgtattttgacagcttagaaaaaagcgcaaagaaatacaataaaccgatcgtcaatattccgccacaagcgtatgtaccaattccaatggggattgataaattgtctaacgtgattcttgaaaatatttagtaagggctgataaccatgttgagcaagcgcgagacacaaatcctaaaattattatttgaccatcggcatacttatttgacgagtcaagaaatcgcttcaggaattgatgtttctaatcgaacagcgaggaaatatcttcatctgctggaggatgcattaaagcaggaatcaattgctgtaattgaggcaaaacaaggaaacgggtaccagttgaaaattgaggatgccaggcgattcgatgaattttatcttaaagaggtcaaaaatcagatggcttctaaagatatcacaacgattcaagaatcaaatgatcgacaatactatattttgaaccgcttgttttttgaacaaagtgctgtctatgtggatgcgattgccgatgaactgtttgtatctcgctcaaccatatcgaacgatttagttgaaatcaaaaaactaatcacgccttaccaaatcgagcttcaaagcaaaagtaataaagggattttcattgtcggaaatgagcaaaatatccgtcacttcattatgaactatttctttatggagcggttgcatgacaatttatttgccttttccatgtacgcgaacttattggaagggatcagtgttgaagaaattgtcattattgttttagatgaatgtcgagaatcacagttaaagctttcagatttcatcgtttataatttagtccttcatattggtttggcgatcaaacgaatccaaaatggcttttttatggatattcaggcgccgatatcttttgatgaagattcgattgaatatcaaaccgctttgaaaatattagccagaatcgagcatgcggtagggattacgttttcttcggaagaagcggattttattgcccttcatttaaaaaataagattacggcgaaaacaattttcaaaaaagcggatgcaactgaagagcaaatccgagcacaattgcttgaaacattgaaggccattgatcaggatacaccatttgatttagaacacgatacgattttgattgatggattaatgctccattttatcccgctgttaactagactgcaaaataactctagtatcgaaaatccgctgctagaggaaattaagacgcaatacccggatttgtttgaattgacggtcaactatttttcgaaaatgccggtgtttaaatcatatcaagtgactgaaggggagtgggcctatcttgcgatccacatcacagcagcggtggaacgctacttcaatgaacagaagactcatgtattggtcatctgtgccaccgggttaggcagctcgcaaatgatcaaaaatcggctggaacgcgaatttggttcgagaattttgattgaaaaggtcattagttattatgaaatcgctgaacaggatttaagtcacattgatttagtcatttcttcgattaatttaggcaatattgtcttaaatgcaccaatcgtcaatgtcagtgttttcttaggaaaagatgacattcaaaaaatcaatcatgaaatatctagtaataagggtagccatttcgttgcaggtcgaaaggaaagcgatcgaaaagaattggttgaagaacaagttgaattaattgagcgaagtttcaaacctgatttattctattttgtcggagaacattcaaccaaagatgctgttttaagagaattaatcagcaaaatcgaagctgttgaaggaaccgacttgcaagaaaactttttaaaacaattaaaactgcgtgaatcctacagctccgtcgtattttctgaatttatggcggttccgcatcccatcgaagccttgaccaaagaggggcatgtggccgttgcggtagcacctgaagggattacttgggacaaggaatatcaaaatattcagttagttttcttattatcaccggataaatttggaaagtttgagatagacaaggttagtcaaatgctggttgagattatggaggatgataccttcaggaaagccttaaccttcagtgatacttttgataactttataaaagcgtttattgatcaatttaaaaaaagagagtagaaggagaaaacaatggactcagaaaaattacaagaagcagcatttgaaattattttgagtagtggggatgcccgaacacttgtacatgaaggcttcaaaagtatgcgtgaaggaaactatgaagaagcagaggtacatttgaacgaagcaaatgattcactagtcaaagcgcataaagcgcaaaccgaactcctgcagcaatatgccagcggagaaaaaattgaaatggaaattatcatggtgcacgctcaggatcacctgatgaccactatgaccttacgggaagttgcgatcgagatgctgtcgttatatcgcaaagtatcgtaagaaatgatagtcattagtttgaaataaagaggagaacagacgatggataaagaaactgttagtcaattaaaaaaagaaacggcattgaagaattttcgctacaatcgtttccttctacttagatacttattagctggttttttctttactaatttatattggttgctttctttggctatgagcagaagtgcttggtcattgctgccgctgggattaattgtgctttcagtccctgccatcgcagaacatttgcgtctttacggctatccatcagatgatgttcgcaatcagttaaaatggcatcgcttgtatcaaatgacccaaggaataatcaatcttgttctactggtatctgttttaaccaattttgggttcgaacaagtttttccatttttcacaaatagtgcaaccagcaaaggatttgtcagttgcattttattagtcggtatgttgttgtcaggaattattttaaaacgcattcagagcatttatagacagaaagatagacacgcctcatatattacagagttcagtaaactaaataataaataaagggtgattaaaaaatggacggatcaaataacaaagtctttgcttttttagagaaaaacctgatgggccctatggggaaaattgcctcactaaaagttgtgcgagcgatcatgggtgctggtatgggcgcaattccatttacaattgtcggttccatgtttttagtgttcaatattttaccaatgacctttccgtttctagaagggatcttcaattcaaccttctttaaatttgaaagtctttatatgttagcaaatagtacaacgatgggtattttggcattatatttctgtgttggattaggctatgaatatacgaaaattattgctgaagaagaagaattgaacatggcgccgattacaggggcgttactatcaatattcgctttcttcttgtcaattccgcaattaatgatggaaaaaggcagcatcgttcgtttgacgaaccttgacgaaggaattatcaacggctgggcaatcggcggtgatggggtctctcgtttaggaacagtcggaatctttactggaattatcatggcagtgattgctgttcggctttatcgtttatgtgtgaagagaaattgggtcatcaaaatgccagaacaagttccagaaggcgtatcaagagcctttaccgcattgattccagcatttgtggttgcttttgttattttaatcattattggcattttagtcttctttaatacagatattttccaattgatcgcgattccgtttggtttcgtaaccaaattaaccagcagctggatcggtgttatggtcatctacttcttgatccatgcgttgtggatcgtaggtattcatggtgccaatatcatttcttcattgatcgctccgattactttaggaaacttggcattgaatgctgatggcgcgcatattccgttagctggtgaattccaaaatgccttcgtaaccattggaggttcgggtgcgacgttgggcttgtgtctcttcttagtttatatggctaaatcagaacagttgaaggtattaggaaaggcttcaatcgttccatgtctcttcaatatcaatgaaccgttgatctttggtattccattgatctacaatccattcatggcgattccattcttcttggcgccaatggtttcggcatcaattgcttacttcgcgatccaatttgaattgattcgtccagtaattgctaatatgccatggccttcaccagtcggagtcggtgcctttatcagtactggcggtgactggaaagcagctttagttgcgattatcggtgcagtagcagcatttgtcatctatttaccatttgctcgtgcctacgataagaaattggtcgatgacgaagtggctagcacagaagaaactgctggagacagcgtttcagtataaatactcagagaaaaaatagctgccggcaattgtcggcagctattttttagcattcctctttcgttgtttcgtaatagtctaaaaataattcgtgtaacgcaggatgtgtttttcgcaattgcaccaaacgattggtttcataggacataaagcagtgttggctcgttcccgtcgtgactaatttttcaccattatagacacggtattcgaaatccaaacgggtgcccgtatattttttaacgacaggctgaatcaggacttcatcgccaaagcgaaccatctccttgtattcacagctgactcctaagacggggatcataataccgtctgcttcgattttttcaaagggacaattcataaagttcagagcgtcaacgcgagcttcttcaaaccagcgaatgtaattggagtggtggatgatgcccatcttatcggtttcataataaaaaggcttgcgagaatagccgggatatttttccatgattaattcctttcgagggcgtattttttcatataacgaggaagcgcctcactgatggttgtaggtaaaactacatagttctcttcagccaaatcatcgccgatcaagctatgaagataaacagcagcaccgattgtatcggtatttttttcaaactgagcgagaaaaccagtgatcatgccagccagagtgtcccccatgccgcctgtggccatcccaggattaccaagtggattttgataataggcgaccgcctcatcataaatcgttgtgcgatgactttttaggacgatcttggcgcctaagagcgcttgctttgcacggttattttcatcggtctgctggataaagcttaaaccacttaggtgtgtccattccgctaaatgcggggtaaaaatggtttgttcaggaaattttagggataatttgtagtccttaaacagcgtgatcgctgagccgtcaatcactaaccactgctcggcctgttgattggtcaaaacctcttttaacagcattgccatttcctttgctagtcctaaaccaggaccaatcaaaatgacatcggccttttctaatacttgataaagcgtcttcgtctcattgaaatccaataccattgcttctggtaaacgagtatgaagtgcagtatgatttttttcagcagtgacgacagtagtgagtcctacgccacttttgatacatgcttcggcgctcatgatgatcgcaccgccatattggtgattgccgccaatcaataccactcgtccaaaggttcccttatgagaattctcgggccttttcgtaatcactttatgtaagatgtctttatttaattggaccatctagtcacctgctttcatcctataaatcgtagcgaataaaccgttcaagataaaattcactatgggtatcattataagggaaaaaggagaaattttcctaacaaatattaaagagttttcatttttattctattgaatagagtgctatcattaaagtggtttaaattaaagaatgtcagttgcgagttctacttcgtatttctaatacgttagtggaatcgtatgccaacgacaataagaaaatttgactcaaattttacctcttcattagagtaggctcgacatttcgtattgtttatagtatgcaatctcgttatccacgagctcgcctagcagttgatgagatatctagttggatatttggcattcgcatcgaataaggaggaatctttcaatgacaatcgattttaagaaagaagtcgaagcacgtaaagatgatctattagcggatctattcactttattgcgtatcaagagtgaacgtgaagacgacaaagcaactaaagaagcaccattcggacctggaccggtggaagcattagaaaaaatgcttgaaatcgcagaacgcgatggcttcacaacaaaaaacgtcgacaattatgccggccattttgattacggtgacggcgatgaaaccttaggaatcttcggtcacttagatgtggtaccagctggcgacggttgggattcagatccttacgaaccagaaattcgcgacggcaaattgtacgctcgcggctcaagcgatgacaaaggcccatcagttgcggcttattatgcagtaaaaatcatcaaagaattaggcttaccaatctctaaaaaaatccgttttgtcttcggtactgacgaagaaagcggctggggagatatggactactatttcgaacatgaagaaaaacctgatttcggcttctcaccagatgcgtatttcccaatcatcaatggtgaaaaagggaacgtaaccatgatccctcattttgacggaacaaatggcacttcttatgttttagtaagcttcgaagcaggcttgcgtgaaaacatggttcctggcaatgctgtggcagaagtaaaagttgccgatgcagacgctgcggaaaaattagccaaagaatttgcagactatgtagagaacaacccggttagcggtaaagcagatgttgctggttcaaccgttaccttacatttagacgggaaagcagctcatggtgccagccctcaattaggaaccaacgctggtactttcttagcagtcttcttaaataactatgatttcgacaaaggtgctaaggccttcatcgaaaacagtgcaaaatacatccatgaagatgtctatggtaaaaaattaggcgttgacttcaacaatgaaaaaatgggtgaattgacaatgaacgctggaatcttcagcttcaaagatggtcaagaaaacgataaccggatcacgttgaacttccgttaccctaaaggtacaactaacgatgagatcaaagcaaaattagaagaattattcggttcagatgtgaaagtaacagaaggcgcacaccatatgctgcctcactatgtaccagcggatgatcctttggttgctactttgctagatactttcgaagaacatacaggcatcaaaggggaagaaaaagtcatcggcggcggcacattcggtcgtttactagaacgcggtgtggcttacggcgcacaattcccaggttttgaagataccatgcaccaagccaacgaatatatgtctgttgaagacattttgaactctgctgtgatctacgcagatgcgatttatcgtttggttaaataattgattattgaaatgggcctcgcaagttcttaattgcgagccctttttgtcagtcacgctttttgcagtttgcaaagagtaacttgtaattaatagttttcgttaatacaaaaaacagactgtttagcgtgatgatatgcgtacgaagataaggtcatttttcccgtttttgggaaaatgactttccttcaaactgagctagctgtctgcgattggcttaaataccgatcttgttgtatgcttttttgagaacgtttaaaggagtaccctatgaagagaaaaccaatcattttaagcaccgatccgggaatcgatgatgccgtagcgattgtcttagccctttttagtgaagagctggaggtaaaactaatctgcccaacctttggcaatgtcaatttagaacatacaaaatcaaatacggaaaaattattaactctattgaaaaagtcccctgaagttgttttgggaagttcacattcgttgctaagagaagcaatcgatgccagtgagattcatggagagtcggggatggatggctatgattttcctgaagctactattttagcggatgaatcccaaaccgctgttgcagcgatgcatgagatcgtgagccaagaagagcagacgattctagttgggatcggccccttaaccgatatcgcgttgttcattcatctttatccccaagatttgccgaagctcgatcgcatcgttgtgatgggcggcagcttagggcgaggaaattatggtgtgttgtctgaatttaattttgccgccgatccggaagcggcaaagatcgttttcaacagcggcgtaccgatccaagtagcaccattagaagtaggcaatcaagccaaaattatgccagaaactacagataagattcgcaacttcggagaaatcggtaagatgatccatcaattatttacgaactatcgcagcggcagtttggtatcaggactaaatatgtatgatgcgctggcaatcgctttaattctaaagccggagatgtttgagcttgtttctactagagttgagattgaaacaactccatcattgagctatggtgcatcactagttgatctagagaactatttgcatttaccagcaaatgcggaagtggcgactaaggttgatccaaagcagtttgaacaatggtttgttgagactttggcaaaaacaatgagctaaaaaaggaataaactatttatacagacagtaaaagcgtaggccgattttttcgacctacgctttagtcattaatgatacgatcgatacttaataccgcaccggttttagcatcagctttaaattcataagcgaccaagtgatcatcttctgtccgagtgattccgccagaaagaatatccattgtgatagcgaatttttgcatgtgctcagtgtcgaaggaaatccaagagccttcgattggtccttctttcagaaaagccgctttgatttgatccaagaccttgtctggggacattttttgtttttttcgataatagtgatttgctgcgatgcctgcagctaaaccgatcgttgaaccgatagccaagccttgcgcgaatctttttgttttctccatagcatagacctccttgtttgtcgttcatctattttctagtcaaatatagttttgtgtgtacgccttattttaccattgttacaaacgaatttgaaaattatacgtcattattttagataaaagggaatgattataggaatgggagagttcgcttctttctcaaaaagaatgaaaagtgtataatcagaggtagtaaatgaaaaggtcgtgacgctatgattatccctaaaagtattgaagagttagctggttatgcggaaaaaggcaagaatgtgtttttctttactgctgattggtgcggtgattgcaacttcatcaaaccgcagatgccagagatcgaagcagcatttccgcagtttcaatttatccaagtcgatcgggacgaatatattgatgtggcagccgagtggaatatctttgggattcctagttttgtcgtaatcaatgacggagaagaattaggtcgattagttaataaaaatcgcaaaacaaaagacgaaatcgctggctttttgcaacgagtagaagggtaggagattgttatgtttacacaatcatatcaaaacatcttagtcggaattgacggcagcgatcaagccatggaagccttcaaaaaagcgctggctgtggcaaaacgcaatcacggaaccgtttatgcggccaatgtgatcgatcatcaagtctatacgttcatgagttattcgcctttaaatgaaaatatcatggatcaattaaccgccgatgcgaaaaatctgatcaatgaatgcaaagcctttggcaaagaatatggctacaacaagatcgaagggattatcgcctatggatcagccaaagaagcgatggcgagaaccctgccagagaaatacgacattgatttagtgatggttggacaatcgggtttgaatgcggtagaacgcttcatgaccggcagtgttgccagctatgtgatcaaagaagccttatgtgacgtgttgatcgttcatccaagtgctgaataaaagctggcttgaccagctttttattttgaaaaaaagaggatcgggatggattggcaaactcgttaaaattgctttttaaagtttgcttcttgctgatgaagtttgtttgctgagctagaaatgaaaaaaatctcatgcaaaagtcctgtcagatttgttaagatacgagaggaatacgactggaggtaaaaacgtgatttttgcgtataataaacaaaatgtcggcgataccttaatggtcatcgtcaaaaatgatgaaaacaaggaaaattctgtcgaacgaaagggcacggttgcccgtgttcagacaaccgatgggaaaaccgtcgcttggaactttttcaatgtttccgactacttaaccatccatggcaatggacaagttgagctatcagaaaaagatattgaagtcttgaatgaacaattaaagcaatccggttttgaagaacgcttggtggcagatctttcaccaaaatttgtcgtgggctatgtaaaatcgtgtatcgatcacccagattcagatcatttgcatattaccgaaacagaaattgacggtggagaaacgttgcaaatcgtttgcggtgctcctaatatcgaaactggacaaaaagtcgttgtcgcaaagcctggcgcgatgatgcccgatggacaaatgatttggcctggcagcttacgcggcgtagaaagctttggcatgatctgttcagccagagaactgcatttaccaaatgcgcctgagaagaagggcattttagtattggctgaagatgctaaaactggtgagaagtttgaagtagggaaataaaaaatccgttgagaaatatttctcaacggattttttatttagttattcccttgttgctgtgagttcgatttcaaagaattggcatcaatacttaatttaacagaaaccgtttcttttttatccttgcgataataagtgattttcacggtatcgccaactttgtgtttgtacaattcagattgcaattcgacgccagttgaaacgtctgtgtcatcgattttggtaatcacgtcgtatttcttcaggcccgcttgatccgctggtgtagaagattgaacgctgttaattacgaccccttgggtaacagagctaggaactttgacaatttcgctgacttgttccgtcgatagatcagacaggttgaccattgtgatacctaaagctgggcgaaccactttgccgtctttttctaattggttgataacattcacgacatcgttacttgggatggcgaagccgattccttccacactaacatttgattccgtttgaacaattttacttgaattgattccgattacttgtccagccatattgactaatggaccaccggagttcccaggattgatcgccgcatctgtttggatcgcgttgatattcaccgtttgaccttcatcattttggttgacgacttgacgattcaaggaagaaataatccccgatgttacggaatttgcatattgagagcctaaaggagaacctaaggcgatggctggttcaccaacttttagattgtcagaatcaccaaaggttgctggtttgatatctgccactttgtctgattcgacttttaagacagccaagtcagtataagaatcggttcccaccaaggttgctttaactcttgaaccgtctttcaacaagacttctaaaccatcctgtttttccaccacgtgattgttggttacgatgtaggctgttttgccctccagcttgtaaatgaccccagaaccctctgatgtttcttcaagctgtccgctatcttcctgtgactgttgattgtcatttccgccgaaaaagtcagagaagccgcctaaaccactttgtgactgttgtttttgcaagttgataacagagacaaccgcatcctgtactttactagccgcatcagtaatatctgaatttacatccaccttcatgttgctgacttttgtattaccagcacttggtgaaccgctagcattttggttattcggtgcaagcagcgaaccattcgctacataaaaaatcccaattgttaaaacagcaccaagaacaccgcctaataagctggtcccaaagcgcctaaaaaaacctggagatttttttggtgtaatatcttttctcatcatatttactccacctctactgtgttatacgttatattaagtatagtattttattgtaaggtaagtctactacagcgatttgacttttttatgaaaaagtttcgtaggaaaatatagataaatgatgaaaaaacttgttttccacaagattagtggaaaactaaggaaaaagtttgttaattgatttagtttttttatccacataaatgtggataaagtggataactcggtggaaaacgtatgtttgtatagaggattccttacaaaaagggaatcaatatccgaaaaactgtggataaacctgtgattagtgtgcataactacgtggaaaaagacaaagacttctgtttttaactgttttgttcggtggaaaagtttaataagcaaaagaaactataatgaaaaaggtgaaatatgatgaacatcaaaattatttctgtgggaaaattaaaagaaaaatatctcgttcaaggaatttcagaatatacgaagcgcttatcgaagtattgcaagatcacgctagtcgaagtcccagatgagaaggcaccagaaaaactcagcgatgccgaaatgatccaagtcaaagaaaaagaaggagaacgcatccttgcgaagatcaaagaacaagaatacgtcttcgccctagccatcaatggcaaaaatcctagcagcgaagacttcgctgccgcgctagacaaattgcaaaccagcggcaaaagccaattcgtttttgtcatcggcggctcactaggactaagtgaccaagtcctaaaacgcagcaacgcgcagatttcatttggtaagatgacttatccacatcagctgatgcggttgattttggtggagcagatttatcgggcgtttaggattaatgcgggggagccgtatcataaatgatgatattattattggtttacgaaaatttctgatacaaacactatataagtcttcaccttgtcaaagatagaatttatagaaaagtaaatgaaccctcagagtatctatgtaaaatgataacctgagggcttattttttatgcaaatattttatcgaatcataactaaacttaattactcatttttatgattcaatcgaaccaaatcgtgacatcattttaatgggcccttgtacaattatttttaatcattaaactaacaggtcttttaattactaaacgtaaatcctaatttttattctaaaacttgcgttttttcttttatttatatagttgtaactaaagattggtaaactaagtggtttcttatggactttcaaagaacttccacaatagataaggaaccttatgtaattgttagcgcttatactgcatggtatcttaaacgtgtaaggaagaacgttagctaacagaaaggtgatacccatgaacaaaaggcaaattaaacttgcgcgcttgctaattgaacatgatgaatttttacctgcttctttttacagtaaaaaattgtctgtctcaactaaaacagtatttcaagatttggagacattgagacttttcgtcaagccctattctattgatatcgaaagacttccgtcagtggggattcgtttatcagggcaagaagaagcaaaaataagatttctgaatgaactagaagacgagctttctcaagatcaactctctccagttaatcggagaatcaaaatcatacgaagtgtgttttttgaagagtataccccgaccctagaattgctatcagatcagtatttagtgagtaaaacttctctttataacgatctgaagattatcaatgaaacgattgctgtaaataacattgagatcatatctaataatgatggattgagcactcaagggccggagaataagattcaaccagcagccaagcagttagtctcacatttttcaagtctcttagaagaacaatccattaaattcaagatgggtcacttcttcgaaaaacagcttgtagaagtaatattcaaggtgctgctaacaaattttcaaaagctcacagaaaatgtctctgattattatatggaatcgttgatgacaactgttttagttcaatgtcgacgaattcagctaggctatcatgttgaaagcgaaaatgactatcttttcagcagtattcgttacatggagacttttgtcgttgcgaatgaaatgattgaacaaatctcacaagaaagtggactcatttttagtgaagcagataaggattacttatctcgacaactttttgctcaccgagtaacaaccgaagcgaaggctagcgatgatgcatatgtcgatttagtctatcggctgatttcccgaatgagtaaaatcgaaaaagttgatttgactcaagatcaacacctatttaattcgctgctttatcatattccagccatgatcctgagattgaaacgtggaattcggattgaaaacccattactggaaagtattcgtgatcaatattctgagctttttagtatcgtctggtatgcactggtaattgtggagcaacagtatgatgtgattttgaatgatgatgaaatttcattaatccttatccacttccaaattgcactggatcgtcagtccaaagcaaataatattatcatcgtttgccaatatggaatgtcttctgcccaatttatcttttcaaaagtgcggaagtttatacctgctcacgacaatgtcgaaatatcgacaatggaaaagtttaatcagagtgataaagaaaatattgatttgattatcagttccattgatattccacagtcaaaaattccttttgtaaaagtaactcctttggtaagtgatcaagactatatcaagattatggaagcttatactaaatatctgatacaaggagatccctttggagtaacagactcattagatagcaatttcgtaacagagacattaaacaagtacatcaaaacagatttggttgagctacaagcagatttttctagtaaagccgactgcttaaatagcatgatagacgaattagaaaaatgccaatttgttacaccagcatttagaaaatctgtctttgagcgagaagaaattggaaatactaatttggatagtggggcggcattgcctcatgctgatccaacaacgatcatgaaatcgcacatttactttgtcacacttagaaaaccaattaattggggtgaccgaaatgtgaagttaattatcatggtgaacctcggagaagaagacttacaagaaatcagagaggttgttgaggaactttatcaatttatcgatgagaagaaaaaagttgatgcacttgtaaaaataaagtctaccgaacaatttttacaaattttcagtactggaggaatttgaaatgttttttgatcaaggattgtgtttgtttcataccaaacctgaaaatcaagagcaactatttagaagcatgtataaagagctttatcaagccggatgtgtcaaggcaagctatatcgatggaattactgcaagagaatcggaatacccaactggtttggagtttaatggtgttggttttgcaattccacacaccgattctgcttatgttaataagtctcaaatctgttttgcatcattggatgaaccggttatctttcaagatatgacggataaaaatcatgacattgaagtgaatttagtattcatgctggcgatggcaagtccgcatgaacaagtagaaacgctgcaaaatctaatgacactctttacagaagaagagaaggtcaaaaagctgcaagagttatcatcacaggaagaatttatcaaactactaagtgactctggagtttattagacgatcaaggaggaaaaagttaatggatgctattatgcatggtattgaatggtttattggattaggatctacagttttcttaccggttatcatttttattattggtttattctttggattgaagccggggaaagcgtttatttccgggataacggttggaatcgggaatattggattaggattggtgttggatttactgtctggtggtttgggaagtgccatccagcaaatgggtgaaaaatttggtacttctttaaatgttcttgatattggggttggggttggcggtcccttagccttttcgacatcactcggaatattgatgattccaatctcattgattttgaactttcttttagtaatgctgggttggactaaaacgctgaatgttgatatttggaatttttggtttcccattttcttaggtttgcttgttcaaactgtaactggaaatttctggtttgggattatcggtgcgatcgttgccgttcttctacaatggttcttagcagatgccgcccaaaaagaggtcagtgagttctttggctatccaggaatcgcgatcactcatatgatggcattatctggtgttttatttgctaaaccgatgaactggatttttgatcgcattccaggatttaataaaatcgatgcggatgccgaaagtttgacgaagaaatttggtgttttcggggacacagtcgttattggattgataatcgggatcgttgtagggattttagcaggatatgacgcagcgggtgttggtttactcgggatgcaaacagcggcagttatgaaggttatgcctaaaatggtcgcaatgttcatggaaggattgctaccgatcgcagaagcagctaagcactttaccgataaaaagctaaatggtcgggtagtaaacattgggatggatgcagctttaacggttggacatccaacagttatgtctacttcattattattagtaccaatctcattgctgcttgcggtggttttacctggaaatcaagttttgccatttggtgatttggccttcttcacatttgcgatctgtttgatggttccctattttaaaggaaatattattcgttcattagtagggtgttctctgtatttgatcatgactttttatctatccacttggttggctcctatagttacggatctttttgcaatggcaaacttcgatgtgggcacatcaggcacggtaactatgctattgagtggcttatggccagctggactgtttgtattattggcacaaaggctaggaatcttcggtattctccttttgggtgtagtgattctagtagggatgctctactttaacaagcttaaaggaagcaaagaaaaaagtgttcaggaagcataaataaaagaaagcgggaattaaacatgaaaaaattattagtcatctgtggtgcaggtcatgcgacctcaacaattgcggtatcaaaaatcaataaatggttagcagcggagaattatacggatcaggtcaaaatctatcaatctaaaattgcggatgaattaaataagatggatgagtatgatgcggtcgtcagcacgacgattgttccagattctgttaaagataaggtaatcaacggattaggcttgttgacaggagttggtgcagacaagatactcgaagctgttgaagcccgattggatttgaaataaatgattaaacacgacgaaatcaaattgcacacagtagcaggtcgtgcttcttatcatgatcttcgtgaggacctagtcgaaatcacacacaagtcggggttaaaagacgggcttatgactattactacaccccatactacttgttcctttttctatgaagaaacaatgcatgatgtcaattatttcggagatgatctgttacacgttgatattaacgaagtgatggaaaaaattgccccaatgatggtaaccgaaggacaataccatagtcccggaccagaacatattgcctttggaacatcgctaagtgaccctaattatcctgcggaaaagtgggtgatgctgaatacagatgctcatttgaaagcatctatttatgggaccaattcacagtcattgattttaaaaaatggcgagcttcagatcggatcattaggacgggtctattttgttgattgggatcgtttacgggaaagagatcggacaattaacgtagtgatgatgggggaatagatttaatgaaagagtttattttggcgccttcgttatttagttcgaaaatcagtcgcttgaaagatacgttgagaatcttaaaggagacggatattcgatggcttcatgtggatgtgatggacggctgctttgtaccggatatggcttcagggccgagcattgtgaaagagttaaaagagcttgatgatactttgttggatgttcacttgatggtggagcagcctgaaaaaatcataccggcttttctagcggctggtgccgatgctattacgtatcatgcggaagcaaccaacaatgggatgcatattattcagatgatcaaagaacaagaaaagaaggtaggtgttgctattaatccggcaaccccagtatcattgattgcccctattttatcggaagtcgatctggtgttagtcatgacgatcaatcctggcagaccgaataaggagtttattccaatgacggttgctaaaattggtgagctcattcgcctaaggcaatctgatgattatgatttcttaattgaggttgatggtaagatcgatagtgagtcgattaaactttgtgcgaaagcagggactgatatgtttgtatctggcggctatatttttggtgaacagggccaagaaatcgaaaagatcaataatttaaaaactgcgctgacagaaatataggaggtacgaattgaaaaattatactttaactatcctaaacgaacttacacaaaatgctgaaaagatgaatactgaccaaattaccgcttttcttgctgagatcaaaaaggctaagcatatctttctttcaggagcggggagatcaggtattgccatccaagcatttgccaatcgccttatgcacttagggtttgatgtgagtattgttggtgaaaccagctcacctcattcacattctggcgatctcttaatcatttgctctggctctggagaaacagggagtttgaaatctttagctgaaaaagctgctgataatggtgttaatatagcattggtaacgatgaaggctgattctactattggtaacttagcttcttccattttaatactgccaggtactacgaaaaatgagaatgaacggaatacaaatcagtttgcacaaccaatggggtcggctttcgaacaattagcatttttgactttcgacagtgtcgttttaaacctgatggacgaccttggcgaaacctcagaagctatgtttgctagacatgccgattttgaatagctaaaagatttaataaacgagtcttcatttgtcaaaacaagatgctagatatttggcatatgcaaaaaaatagaaaagggctgcaaaacgattgtctaaaggataaccgttttggagctttttttgatgcattcaaaagcagatgcctcgattgattaaggttaatacgaatcgccgcgtgcaaactaaattttgcgttaagcgatttattttaaaaaaatatttgcatatgcaaaattatatgttggtatattggtaacgattacaatatattgttttacttctcgagaaatggttgcattctttgttgttggttgtttgggtatgaataccctcagaagaataagaggtggaattgatggaaaaactattagaagtgacaaagtatattacggatgctctcggtccaacagttattatgcccttgtttttaattgtcttagcactagtatttaaaatgtctctattcaaggccttgaaatcagggttgatggtcggaataggatttcaaggaatcaacgtaattatcaatttgctggggacaacattgtctcctgcagcaacggctttagcggaaaatgtaggcaagccgttcccaattatggatgttgggtttccaactattggtgctgccgcttggtccagtccgattgccgcgttggtaatacctgtagccatattagttaatattcttatgctggttcttaatcgaaccaagaccttgaacattgatatttggaacatgtttcatttgattttggctggaagcttagcctatttggtctgtgacaatcttttaatcgcattactggtctctgcaatattcgcagtaattattttagtgatcgcagataaaacttcggattcgtggcaggagtattacggattagaggggacgagctgtacaacactgccgaacatgttcacgatgattctggcatatttcatcaatcgcctaatcgacaagattccaaaggtaagagatatcgatataaatcctgaaaaagtgcaaaatatcaaaattttgagtgaaccaatgttcttaggatttattattggagtggtaattagttgggttggagggctgcctttagcaactgtcattaatacaggggttggagtagcgtcttcaatgatcttattacctagaatggtatcgattttgatggagggattatctccgatttctaaggctgccactacttttgtaaaaaataaattccatcgtaaagaattactgattgggatggatattgctttgggattaggaaatcctgtggtaatcgcgtgttcaactattatgattccagttgctattttattagcgttagtattgccaggaaatgaatttttacccattatttcactcacaggcctgatttatttctgtgttccttgtgtgcaatattcaaaagggaatctattcagagctttagtgataatgattatcttttattgcacgcaattgtatgtaattactgctttgtcaccacaaattaccgctctagttgtttcatcaggtattgacctgcctgaaggtgctaagttgattgctggtgggaatccggaacatttatttttactgccaataaaatgggtattgaacttgcttggattttaggtgtctctcaaattagaaatcaggtggatgtatggtatatgatttaatagtaaaaaacggaatcgtcgtggatcctcttagaaagatccataagaaacaggatatttatgtgaagaatgaaatgttcgttctcccaaaaatcgatggtaagggagaaatgcgtgcaaagaagataattgatgcgactgggtgttatgtttttccaggattaatagaaggacatacacatttgtatgaaggcgggagtgaggctggttactctccagacctgatgcttcttccgaatggagtgaccagtgcaatcgatcaaggtacggctggatcagcgaattttacttcattctataatcaaactattttacagtctaaagtagatattaaagcttttctgaatatctccagcacaggtataacaacggaaaaatatatcgagaatattgatccaagtttttatgatcgtgatacgatcagatatttgtttagaaagcacaaggatactttgataggattgaaaattagaatggaagaagcctcttgtggagagatggggattacacctttagcaaaaacaattgaactagcagaagagcttgactgtccagtagctgttcacgttaagaatccaaacgttccaatccctgagatcgcgagtctcttgcgaaaaaaggatacttggattcacatctatcagcaaacgggtcaaaccatattcaatcaacataactttatttatccagaattatttgaagcccagaaaagaggtgtcttgttcgatgtggcaagcggcaggagtgccttctcatttaagatgatccgtgaatctatggagcaaggcttcaaacctgatttgctgggaacagacctcgttcagtttaattactatgagaaaccaattttctctcttttatatacgatatcgctgtacaaaagttttggatttacgatcgatgaattgattgaaaagtgtacagtacttccagcaaaattaatgaagctagacgataaaattggttcattagctccaggttttcaagccgatatcagcattgtaaaaatgaaacaaacggatattctttttgaggaccggcatggtggaaaacaaatcggtcaggaacttttgataccaatggcaacgattaaagcaggcagacttttataccaaaatattgagttctaacaattatcgaaatcgttctcattcgttggataactgtgctatcatcaaagaaggaagtagaagagcaggaggattacagtgaattcagcggatagaaagaaatttatcgtagactatttagaagaaaattattctgtaaaaatcaatcaattgagcaaggatcttaaggtgactcgggaaacggtccgaaaggatctttatgaattggaaaagcaggggttaataagaaaggttcttggtggagcagtaatcgaaaactcaaaactcaagtcaacgtatgaaaaacgcaaacttgaaaattatgaggagaagcaaatgattgctcagaaggccatctcattcatcgaacccaatgattcgatttacttagattacgggaccacagtctattgtttagctgaagagattcttaaaatgggcaatgtgacggttgttacaaattcgattcaaattgtaaatctgcttctgaagaatccgaccattgacattattgtcctaggtggcctattgagaaagaatgaggattcgttatcaggctctttcggtttgagcaacatggataagttatcagtaaattatggtttctttagtggtggaggagttgatccagaatttgggttaacgaatcacaatcttggcgaagctgaaatttcaagagagatgtttcaaaagagccagacaaaaattgtactggttgatcatacaaaatatagaaatgtaagcttgaatcaagttgctgaaactaaagacatcgactttatcattacggatcaatctgttacagaaaaagataaagaattatttgaacaattagaagttgagttaattagtgtttccaaaacgaaataactgctatcaaaagtagcccgtgggatcgattccacgggctacttttggttttggaagtttttaggttgtgaaaaccaagtatcaacatgtgatcacttgggtcaccgtttctagtttttttattttttcttcatcggcttctttgttagtgatcatggcagtaatgtcagaccaaccacaaatcttgtatagactttttcgttcgaatttagtgtaatcacccaaaatatatcgcttctcggaatgtcgtatgattgcttgatctacaaagacatcagaggaagaagggcttgttggaccatcaagattgctaaaaccatctgttccaagaaaacaaagatctacttggatttgctcaatttgtgaaacagtccagcctccgaaaacagaggagctcggttcgcgtaactctccaccaaataagaaaacttgattctttgaattgattaacaaactcgctacagggagagagtcagtgaaaattttgtagccggatttctcagacagaagaatcgctagttctaagatagtactaccggttccgataatgatcgaactattatcagggattagttctagtgccttttgagcgacttgttttttgtaataggcattttccttttcacgaacctgaaaggaatgttcaatcgcattttgttttagcgttgcaccgccatggcttttaacaagcaaacctttattttctagataagttaaatcttttcgaatcgtttcgtaagtgactgaatatttacttgccaactcactgacgtatacactgccttcttttattaattcctcaagaatcaaatcgcgtctttcttccattaacagcatttattcacctcatttaatttctctaaatcaagcataacacaaagccaatctaaaacaactgaaaaaccaattatatctactttaattggtattatttggctttttaaccaaatgataatttaaaaaaccaacaaaaagctattgacaccaattaaaaccaattgtattatgtaagtgtaatcaaagtaaacggattcagaaaggggtttatcatgaaaaccaaaattgctatagcttgtgatgatttaggtttcgaaacaaaggaggcgttgaaacaatatttgattgaagaaaagaatgcggaagtcgtatatgatccagtaaaagtacctgaagacggagtcaatacatttgctgcattggcagatgaaatgtctgtattgatccaaaaagatgtgtgtcgcttagggatttatatttgtggaaccggcattggttttacctgtcaagcaaacaagcattggggaattcgctctaccgcagtgactaatccatattctgccaaacgagcaagactgagcaataatgtccaaattatcggtttaggtttgcgtgtaaatgggttagaatacatgaagcagattgtggatgcttggtatgatgaagcatttgattttgctactgctagggaaaactctaaaaacaatctacttgaagcagaaaaaaatgacaatttacttttgaagaagccagatcatgttgcatggaatatgggattcagaccagattaaaggagggaagctagtttactagcgcacaaaaatggaatttattacacagtttattaatgacttaggcaattttattttcattccaatcatttttctaatctttatggttgctttggggagacctctagctgaagcaattcaatctgcaatgaaggttggtatcggatttatcgcgttatctatggttatcgggtttatgttggaaaagatggaaccggcgattaccggtttagctggaaagacgggttcatcgcttgatgcgattgacgttggtggagcagcaacagcggtaatgggatttggctccaatatgggtgccatcatcattccactctgtgtagccatcaatttgttgttgcttgtatttaaaatcacagactgcgtgaacgtggacgtgtttaatctacaccaaaatgcttcaatgggcgctatcgttgccgtctattcgggtaatttcctatatggtgttctggctgctggtttgttccatgtttgggccttgattgccgcagacttaggtgcgaaaaacaatgaaaaattctttggtttaccacagggagtttccatttcacatccagttgccaatacgtatttattatttgcttatccatttaactggctatttgatcgcattcctggattacgtaatttaaatgttacggctgagacgattcaaaaacgctttggtgtattgggagatcctactatcatcggatttctgttaggaaccttgcttggtctgttcgggcttgattggaatagtccttatcatacgattatttctagtgttcaattaggaatgtatttagcagctgtcatgcttctattgccgaaaatgacatcaatcatgatggaagggttagttccattgtctaatgccgctcgtaagaaattagtgaaacgcttccctgatcgtgatatcacggtgggaatggatacagcattaattgtcggaaatccgtcagttatttcatcagccttgctattgattccagtcatggttattttagcagtcgtattgcctggtaatcgtgtgatgcctttaggtgacttatcacaatttgtattctttatcgcttgtatggttccggtatttaaaggaaatattattcgtacttggttatcatcagtaatcttattcggtggcggattgtatattgcttcttggatgacgccagctacaaacgaacttttccaaaaattcggtgctggagcacagaaaaacgtgatgtactcttcattaaatccatcagcaaatccatttacaggattgtttgctgcagcttcacatattggtatcttcgggtacatcttgatcgggttactattgatctcaatcggatatttattgaaaaagaaagaacggtcacaacttcaaaatgatgtggcagtgtagtatattaaaaaaaaatcgaagaaagcgggtattaacatggataaaaaaatcttagtcgtatgtggaaatggtatcgcctcatcatcaatcatggtctcagttttagaagacttcttaaaggaacaaggaatcgctggtgtagatgttcaaaaatcgtcattaatggattgtaacgctgaaaaatataatagctatgatttggttgtttcatcaacgaaaatcgataatccagatgtaaccacgaaggtcatcgttggtgcaggtttattaactggaattggtgaagatgaaatttttgatgcagtgaaagctgaaatcgcttagtgggtgaaataatgagtattgatataattgtaagtaacgcaccagcaacagtttctacctatcaggatggaatcaaagcggctggagggaaattggttgaactaggcaatattgatccggcctatattgatgcctgcatcaatcgcgaagtggattttcctacaggcttacttttagccaatggtgaagggattgcgattcctcatggaaattctgatctagtaaaaaaagacagtatcagtgtcgtacggcttgagaaatcagtagactttgggcgaatggaagataaagatcttcaagttagctgttctttgattttcaatctagctctggcttctggtgaacaacacattagcattctaagaaagctaattggacaatttcaagacgatgagtttgttaacacctgtcaaaatgctgaacaaaatgaggtacaagcatacattgctaagaaattagcggaataataagagacgggtggatgattccatccgtctttcctttaaaagtaaaaaaaaaaatcaggaggaacgatgtgaaattttttaatgagattattgatgaagtattaacggctggaaacgggatttctgaagaacaagttgatcaaatgacagctgctattcagtcggcagaccacatttttttagcaggtgcaggaagatctggcttgatgattcgcggatttgccaatcgattattacatctagggtattcagtaagtattgtaggagagatcagctcaccacatacaaaaccaggggatttgtttctcattggctcaggctctggtgaaacaactagtttaattaatcaggccgaaatagcaaaaaataatggagtcaaaattggcttgtttacgactaattcatcatctactttaggcaagatggcagatactatcgttgtgatacctgctcaatcaaagcaatccgctgatgaaacgttacaaccgatgggttccttattcgaacaaacgacactatttttatatgatagtattgttttaaatctaatggagaaaatggacgaaacaaatcagacgatgaaaccgagacatgctgatttagaataaaaactgaagaatgaaataatagaggcgattagtcaaaagcagagcgatctgaattttgactgattgcctgttttaaatgaggattttgttcggatgtagtttcacgtagtctcatagttttgacaatccgttatttagaaagtaaaatctatctgtttcattatggtataattatttaatatcgattaaagatttttcggtttagttattttaagtatttattttttcgttcatcacaatcgcattcttttttttcacattttttgaactgaaaaaattagatattctctctgaaagcgcttattatttactggaggaggttagcaaaaatgagtaatcgtgatcaggaaatacttcgacagctgataaaacatcggagtttaaaggaagaagatttattagctcagtttgaaatatcatcaagacaattggcttatagtgtagaggcaattaatgaaaagttgcttgaaaaaaaactacctataatagaaagaagaaatggctactattatgcaaagaatgaagcggctgattatttaacgattcatcaatcggtgcaggatattgttttctcaaaagaagatcgggtgtacttattactgatcatgattttaacaagaattgaagaactatcgcttgatcatttctgcattgaacttcaaatcagtaaaaatactgccttaactgatataaaaaaggcgaaggagttactgggaaagtaccatttgaatattgaattttctcgaaaaaaaggctatgtgattgttggggaggaatgggataaacgaattattctgtttcacgccattattcgaatttataaaaattatggggataatgtcaccattcaattgctagaaagctcgcaaaaatacatggatcatgttaccaatgatgtcttgaagatagagaagtttttaggtgttaaatatacggatgaagatttttatccattgatctattttatttcttccatatttgtaagaattgaacgtggacaactaatcgatagttgtcgtattgatgatcgggaagaaatcgagaatacaaaggaatatcaatctctttcttatatcacgacagattttcctgatttaccagaggatgaaaaagtctttatctctctacaattgttaagttcaaacgttagaaacaaaagaatggtttcagagaaggatttgcctttactggctaattctttatgggaattcttgactgagtttgagatgaatacgctgttggtcctgtctgataaaaaggatctgctaaaaaagctgctgaatcattttaagccggcctattatcgtataaaatacgacctttctacaggaaatgttctctatgataagattcgctcagagtacaatgtcttacataattttgtacgacaatcgatcgcacccttggaagcattcttccaaaccgaaatagcggatgaggagattgcctatattaccttgtttgtaggcggacacctaatcagtacagatcataatgatttagaagataaaatcatcaaagccgccatcttatgtccgaatgggatttctatgtcaaaattgattgaacaaaagctgaaggaaatctttccagaatttcttttttatccaacgaattccatccgagaatatgaaaagtttatgctcccccatgatattgttttttctacggttccggttaaatcagataagaaagtctacgtcatcaacgagattttaaataaaagcgaccaattacaattacgtcaagatgtgattaaagatgttttccaacttgactttgatggcgtgcgatcttcggcgatcgtggatattctgaaacaatatgtctcgatcaataaaagcattgaagcgaagattattgaggacctagattcattattgttaggtgatcgcaaatcagggcaggaaaacgaggtcagttctagtagtgagatagctgatgtcgtttgtgagaagcatgtattgtttgtggaagagcaattgtcttgggaaagcattcttgagttggccagtcaaacgttgatcaaggataatattgtaacggatgattacacggagattctaaagaaagaatacaaggatcaaccgacctatatcatgctgcggcaacgaattgtacttcctcacttagacccaatgctagtggaacagaaattgggcgtatgtatcgttgttttaaaacagggcatcctttatcaaaatgaacgcgttcatgtcgtcgtcttattgaccacacctgataaaaccagccatttgccaatcctttatcatatcaatcgtattgcgaaagacgctgattttattgatgaaattgtcgaatatggcgactccaaaaagattacaaaagcgatacaaaacttttcaagtgaattaaatgagacgtaaaagttcaatatatactcaccgaaaacaacggtaagagcgagacaaatcccattgtctcgctcttttttctgttcatcacaatcgactcagaattatttacactttttgtgaaaaacggaaatagtaattcgttctgaaagcgcttatgatttagtcaaggagttaaacactcactaaaaaaacgaaaaggagcatgattcatgttaaaagattatgtcaaagaagaactggttgttcttaatttagatagtgcagatcgtacagaattatttaaacagatggctaagatttttagtgataaaggctatgttaaagaagggttttacaacttcattgttgaaagagaagaaaattatccgacgggcttagatttaggcacacatacagttgctattccacacgggaatccagagtatatcaagcaatcatttatttcagtcgtcacattaaaacaaccgattaaaatgaagaaaatggaagatgcagatgaagaaattgatgttgatctattctttatcttaggactaaacgatggaacacagcatttacagattttgaagcaagtcattggcttgatccaacaagaagcgttcgttaaagacattctgtcagcaaaatcagcaaaagaagtaatggaaaaaatttcagcagtcgttgttgaaaattaaataggaggaaacaaagatgaaaaaagtaaatattttagtagcgtgtggaagtgggatcgcaacgtcaacagtagcagcagatgaagtgaaggctttatgtaaagaaaacgatattcacatcagtttaaacaaatgtagtatgacggaattaccatcaatgagtcaaaatgccgatatcgtattaacaaccaacaactataaaggcgacattgatgtaccagtgatgagtatcatgggatttgtgacagggattaatgaagccaaattaaaaacaaatctgctagaaaaactaaaagaaattcaaaattcataaaaaagtatacctgttccgcttttgcctcgaaaccaaagcggaacggcataccaatctaaagctgactttatattatcatattcaatcagaaaagtattctgattaaacattaagtaaataagacaaggatttaaataatagcagttatttcaatcttttactcatttaaaatatcagacttatttttcagaaagacaaataaattcattaaaacgaaaaaggagaatgggaatggatacattaattaatatcgtacaaaccattacgggtatgggtgcttcagcaattttaccgatcattatcacgattttagggttagtcttccgaatgaaattaggcgatgcagtaaaagctggtttaacagttggggtcggttttattggactaaccttagttgtaggactgttgaatacgtcattagatccagcagttgattactattcaaaaatgggttcaggatttacgatcacggatattggttggccagccgttggggcggcatcgtggatggcaccttttgccggcttggcgattcctatcggtttagttatcaatttagttcttgttcgtttgaaattaactaaaacattaaatgttgatatttggaattatatgcattttctagtacctggtgcgttggcttactttatttttgataacttctttattggtcttggcgtaacagtcgctttatcagtcttagctttgtttgttggtgactgggtagcaccaatgtggcaggaatactacggcttagaaggtacgacttgtacgacgatcattcatacaggctggacgttgatcgttgcttggttattgaataaggtgattgattttatccctggtttaaacaaattggatgttagtttagaaggcgtgaacaaacggatcggtgcattaggtgaaccggtgattatcgggacgatcgttggggtgcttttaggattactaacacgtcaaggaatcactgaaatcattccgatggggatgggcgtagcaggtgtaatggtcttaatgcctcgagtagttggtgtattgatggatggcttatctccaattggaaaagctgctaaggacttcatgacaaaacaaatgggtgaagacgctgatttgaatatcgggatggacgtagcactaggattaggcgacccgacaacaacgacgacaactgttatttcgattccattagtaatgctttgtgcattggccttacctgggatcaaaacattcccgatcggaattttgatgtcgatcatttacatgtctgttatgaccgttatggcaagtaaagggaacctattgcgctcaattattaccaccgtactattctgtgtcatcgtcatgtacttaggaggctatgtcgctccgggagcaactgaaatgctgaatggtgcaggagttggacttaaagggcaaggaacagacttcgtattaacaggaccttggagtatcttcacttactggttatcgacaattttttaaaaaaatgttctagataaaaaaagaaagaggcgtatgtaaaaatggcacaaatattaccatcgatttttggagcaaatatcatgcatttacaagacgatatccattttttagaagaagaaaagacagaaattttacacgtagacttgatggacggcaatttcgtttctaatattgcgtttggcccaaatcagatcgctgaaatgaaaaagaattcaaaaatggtcttcgatgtccatatgatggttcaacatcctaaagatcatattgatgatgtgattgctacaggagcagaaatgatttctgttcactacgaatcaacaccgcatatccattcgattttgcaaaagattcgtaaggctggaagaaaagccggtgtagtcatcaatcctgggacgccagaagctattttagaatatttgctggatgacatcgattatattttgatcatgaccatcaatcctggacaaccaggtcaaacatttattcgcaaaagcctggaaaaaattcgtcagacaaaagagttgatcggcgaacgtaagatccagatcgaggtcgatggtggcgtaaacaaagaaattgctaaagaatgtgccgaagctggggcagaattgatcgtagtcggtggtgcactgttctcaggcgataaaaaagcacaatatcaagcgctaagagaagcgattaaatagctgattcttgatacgattcccacttttagttttaagtgggagtcgctatcatcaacaaatataagaaatgaggagaaagatcaatgggaaattttgaaggaaaagttgcattaataacaggagcagcacacggaattggaaaagggattgctgaaaaatttgcggctgctggagcgaacacagtgatcgtggactataatccagaaacaggaactaaaacggctgaagaaattactgaaaagtacgtaaaatcattgtttgttcaagcggatgtctcgaatccggatgctttggtagaagctcgtgaaaaagttttcaaagaatttgggcggattgatttcttagtgttaaatgcgggtgtggcttttgccaataaaatgaatgatatttcttttgaagaatggaataaaacgttaagtatcaatcttacagggttgtttaatacagtaaaagctttctacaatgactttctgacaaacgaagggtcgatcgtctatattagttcaggttctgcattgagcggaacgggcggcggtgtttcctatcctgcctctaaagcaggaggagaaggactaattcgcggattagcaaaagaattaggaccaaaaggtgttaatgtcaatgccatcgctcctcgtttgatcgatactggtgaaatgatgcgagtgaattatccaacacaagaaagcttggatgcggttattcaaaagattccggttcgccgttttggaacgatcgaggatgttgcgaacttagcaatctttttagctgatccggcgaattcatatatccaaggacaaacgattttgatggatggcggaagaacgatcgcttagaggagagaataatcgaatgaaaaactacacactggatatactgaatgaactaactcaaaatgcgaagaaaattgatctcgctgaaattgaacattttgttcatcaaatcaaagctgcgaaccacatctttttaaatggcgccggccgttctggtatcgcgattcaagcattcgccaatcgtttaatgcacctaggtttttctgttagcttagttggagaaatcagttcaccccattcaaaaccaggggatttattaatcatctgctctggttctggagaaacaggcagcttgaagagtctggcggaaaaggccaaacaaagcggcgttgatttggctttggtcacaatgaaaaaagagtcaacaattgggaaacttgccgatgttgtattagtcttgcccggaacgacgaaagaagaaaatgaccgcaacgcagatgatttcgcgcaaccaatgggttctgcctttgaacagttagcatttttgatgtttgatggcatggtcttgaatttaatggaagaaactggagaaacatcagaaaaaatgttcggtcgacatgcggattttgaatagttggttgaagggtgaatctgtttttttaaacagcttcaccttttatttataaagaaggctcagaattgttgctggacttcaaaactagctaaagggttcatttatcaaacgacattgggggagaagtgaatggaagaaacaactgtaagggcagtgatttttgatatggatggcgttttacttaatactgaactaatatcaaaacaggcatttgaacaagcgtttaaatcagtaaaaaaaattttggatgagcaaacctatcaagaaattcttggaagaagcttaaacgatattagttattttttatctgataaatttgcggacattaagatcggagaacaaatcattcaggaacgagatcgtttctttttgaattattatcaggagaatcatgtcgaggttttgcctggagtatgctcctttttagaatacttaactaaaagaaagtacaagttggcggttgcgacttccgctagtaaagaaacggcagaatttctattgaaaaaggccaatatttttcattatttcgacgcgttctcttttggctcagaagtagtgaatgcgaaaccaaatccagagatttttcttaacgctgcggagaaacttgagattgaaccagcggcagcgtacattgttgaagatgcggtctctggaatcgtgggtgctatttcaggtggatttattccagtctatattcctgaaaaggaagttgatgaagaatttacttctgagtttaagtgtcaggcttttcgtgatatggaatccttccatttgcatgtgattgaatcaaactttcaacaagctttagagcgagtaagtatgaaaataatggataattgagagagttcattatgaaaatctctcaattatttatttggatattcctttgaagaaaacagtctgattcattcttagggctggtactttttatcagtgacaacttgattctttttctcatttaattataatctatagacgagtcacgaatgagagcttaggagaggtgtttttatggggagacgtgaagaagtattatcgtttattagtgagtgtaaagtttccaaagttacgacagcagatgtgtctgagcatttgctgattagtcgtacagcggcaagtagagagttgaatgctttagttagagaaggccgagttggaaaacaaaaagggaagccggtacattattttatgaataatgactaccagttaaatcaatccgatgattccaaatctcctcaagaaacgcatactcctaattcactgataaaaacatcagaaaaactgaatgcgttttctgggtttattggtgccgaaggaagtttgaccacacacattaattccgctaaagcagcgataatgtatccgcctaatggattacatacaatcattttgggttctactggggtcgggaaaagtaccttcgcccaaataatgtttcagtatggtcaagaaatcggcagatttagcaataaaagtccctttatccattttaattgtgcggactattcaaataatccgcaacttctcttatcgatcttgttcggatatgtcaaaggggccttcacaggagctgacacagataaagcgggtattatcgaaaaatctaatcatggcgtattgtttttagatgaaattcatcggctaccacctgaggggcaagaaatgctttttacaattattgatactcagaaatttcgcaggctaggcgaagcggatactgcggccagaacggttaatgtactaatactatgtgcgacaacagaaaatattgacagctcattattgcaaacgtttaaccgacgttttccgatggtattaacattgccggatcttaaggatcggaccttcaaggaacggatacaattgattgactactttttttgtatcgaatcaaaaaaaattgagcatgaaattaacgttgaaaaaacagtgatcgactatttagcaacgtattcatgtccaggaaatattggtcaattaaaaaatgatattcaaattttttgcgccaaggaatttgcgcaggctatgatacagggaaaaagaacgatttgcatcacatttgatcatatagaagctcgcgaagtgattgagtctaaagaaaatagccgcgttcaggatacggtgtattttcaaggtgaaaagatgcgttctgatcagtccttaccaataactattccagaagcaatcggaaatgagacctccttttatcaatcggtcttggaaaggtactcaactctgctgaaagagggtcgatcaatcaaggaaatccaacaaaaaatcacatcattcatcgatgattttttcaaggtcgacttaaaacctgatcatgtggatgctcattcgaataagggaatcgaaaaactagtttccaaagagatattggatattgtggaagaaataattcaagaaatatcagtagatttagaagttaaaagtgacccgcatatcacttataacctggctctgcatattgaggccttggtattaaaacttcaaacgagtaatagcccttatcgatcaaaaaaaattgttgagcttagttcagagacgtatttcaagaaatatgcagataagttgatcattgaaatcaatcgaaaaatgggcgtagaaataccggtcgaagaacaggagatcatcgagctatttttggataccatttatcaaaatgtgcgacaaaaccctattggaattttgatacttatgcatggcgttggtgtcgccactaatttagccaaaatggttaatgacttattggggataagccacgccgtcggagtcgatatgccgcttgatgagagcgttgagaatgtgtatcacaaagctttgcagaccgttaagcgaattgatcgcggctctggagtactcttgctagcagatatggggtccttctcatcttttccaagtaaaattgcaaaagacacaggaatagaaataatggtcattgacaatgttacctcgccaatcatcattgaagccactagaaaagctttgtttgccaatatgggtatgaaaaaactcgttaatgagttgttagaagaaagcacctatttcatgggcaataagcgtgactcgaatatttttgattattcgagtcgccggctgataaaaaataaggatcatcttttttataattcattagagaaaagcgtgatatttttgaatgtctataaggcaactgaagccctcgatgaaatattgatttcactggctaaacgaatgaattttgagattattgatacccttgtcataaaattctattttcattgtcttggaatgttggagcgagcaattcgtaaagaaagccttgattttgaagtagaggaattggagaaggatgatgattttagagaagtaaaaagagaagtgggtattttggaaagaatgtacggagccgctatttctgatagtgagattttatatgtgactaagattatcaagggatttttataaaaggatcatctgttacagcagaagtgtaacagatgattttttttactttgcacacattgaaaaaaattgcgatgtgtgacaaaaacatgttacacattgagaggaatcagtggaaaagcttatcataaagcggtttccatgtgtgcgagaaaactggcacgctagttgctttatattaagttgaaaggaaggatgagtgtatgattggaattttagtgttgagtcacggcaatctttcacaagggattgtagaaagtggaaaaatgattgttggtacgaatgagaaagttgattacctcgggctctatgaaggcaacaacattgatgagttctacgatcgaacggctgaaaagattcaagcaatggatgatggagatggcgtactggtattttcagacctctacggggcgagtcccttcaaggcgacggcttattgtgtgaaaaagctgccagatacgaattatcgttcgatttcaggggtgaatttttccatgtttattgagagcgttttagtgcgatactcaatggggttagatgagttggctgcccatatcatggatacaggaaaaacgaacatcaaggaattatttacagaagcaaaaacactttctaaggaggaagaataatgagaaatattgtatttactcgaatcgatgatcgtttgattcatggtcaagtaatgactgcttgggttcatgaaaccaaggcaaatgaaattgtgattattgataacgaagtagcacaggatgattttctaaaaatgattatgacttcatcagcgcctgccggtatcaaggtgttgattatgtctgaggaacaggccatcgattacctgacacaggagccagatagaaacaagctgattgttttagcgaagaatcctaaagtaatcaaaaatatcactgatggcggtgtgaagatcgaggcattaaatgtcggcgggatgggtgcacgaaaagaccgcacacaattgtatcgaaatatttctgtcagtgatgaagagcgggcttgcttcaaacaactcatcacagacggaacttctgtttacgttcaagtaatcccagaagaaaaaagtgcaaatatcgaacaatacttataaaagggagagaagaaaatggagattaatgtctttcaagcattattgattgggttgatttattacctgagtataaatgggacaccttggctcacattattgggtagtaccgtactagcacgtccattgatttgcggaacattggtaggtttggtccttggggatgttgttcagggttgtgtgattggcgcggcgatcagcttgccttacttagcttatatttctgccggtggtactgtgccgatggacccaggcttggctggaacattaggaacagctttagctatggcagcgaatgcttcaccagaagtagcagtttcgatggcagtgccgatcggcttgttgggaaccgttatttggatcgctcatatgacggtcgatatttcgttcctacacatgatcgataaggcagcggatgatttaaattcgaagaaaattgatcgcattcagatgtttataccgcagctctttttaatgttgatctcagtgattccggtatttattgttgcttattttggatctggtgttgtgaaggatattcttgatgccttagaaggcaaaccgctacatgtgctagaagtaatcggtggtgtcctgcctgcattaggggttgcgatgattttgaaatcaatcatgagcaaggatactgcggcgttctatttcttaggatttgttttggcagtgtatttagaattgcccatcattgccgtttctattttagcctttatcacggcgtttgtttatacgcaattattctttaagcctaatcaagtttaaataagaggagtgtgaccgatcaatggaaaagacagtagaaaagaagctcactaaaaaagaaatcaaaaaaagtttttggcgttggacatgtttttctcattcaaattacaactatgaacgtatgcaatcatctggttttttgcatgccatgctgccagtcttagataagctttatggggatgatgaagaagctcttcgaaaaagttatcatcgtcatttggaatttttcaatacggaacctcattttggcggaatcatcggtgggttgacgattgccttagaagaagaaaaagccgcaggtgctccaattactggtgatgcgatcaattcaattaaaacagggttgatgggcccattagctggaattggcgacacgttgtggcaaggaaccctggttccaattctcttatccatcgcaattagtatcggttcagaaggaaatgtctttggtccgattttctatatcgtgtcgatgtttgccattatgctgggacttgcgtattacttgtggatgcagggctatagttacggaaaagaaggaatccagaaattgatgggtggcgacctgctgaaaaaagtaatgctgggcgctaaagtaatgggtggtgttgttatcggtgcactgacagcgaattatgtcagcttgagcacaagtttagtgtttaagtttaatgatttaaagctaaatgtccaaaccgatattttggataaattattaaaaggcatgctgccattagctgtaacgatgatcgccttgatttgtttgaataaaaaaatgaaatctaccaccgtgctgttgatcttagtcttgatctcagctgtcggagcgatcatcggaattttctaaggcgttagaaacagtcatccgttttagtttgaaactgtaattctaagaaagagaaattcgagatagacctatccaattcggctatctaatactataaaaaacaaaggacgtgtgcagttcatgggattgaataaatttatttctccatcaatcatggttccaaaaatttacgaatatgaagagtacatgaaacaatttgaacagtataagctctccgtcattcactttgacgtaatggatggtcattttgtaccaaacatcatgctagggacatctgtctttagtgatttaaaagaaatgaccgagataccgatagatattcacttgatggtcaacgaaccagagaaatacatttctatgtttacgacaagaaagaatgactgggttagttttcatccagaaacaacgaatcaaccctatcgattgcttcaaacaatcaaagatatgggttgtagagccggcctagtaattagccctgggacgccaatttcttatttggaagaatgtcttgatcaacttgattacgtgaccttaatgacagtaaatccaggatttgcaggacagacattagtccctaattcttttgataaattaagaagaatcaggcagctgctagattctttcaatccagaaattgatcttgtagtggatggaaatacgacaccagagaacagtaaaaaaatgtctgaaagtggcgcaaacggctttgtcgttggcagtgcctctaaaattctcaaaaatccaagtacctttggaaagtatcacgatgaatttatggctgtattaggataaagcgaaggggtctagttgaatatgaaaaaagcattaatctttggagcaggaaagatcggtcaaggttttattggagaccttcttcatgaagatggttacgaaattatttttgctgatgtatctgatgaagtgatcgaggacatcaacagaaataattgttacagtctattcttaacgaaccataattatgaggaaaagatcattgataatgtttctgccctatcacttctaaataaccaagaagaaatcattgaagcgatcacgcaggtagatctcattacgacatctgtcatgaaaacaaatttagtcagcgtagcgcctattctggctaaagggttaaaaagaaggttatctgaggggcgaagtagagttcttgtgatggcttgtgagaatgctattatgggcacggatacgctagtaaatcttatggttgatacagggattattacgatggatcagttacaggagattggcgcgtatccaaatactggtgttgacaggtttgtatttggtggaatttacaatggtaaagaaggtaccgcaattagtgattctcatgaactggcgattgagcgtcagaaattagatgagccggatagtcaaccgattaaaggagcagagtacgtagataatttagaagcggtactcaaaagaaaaatttatttagtgaattgttggcttgcaataactagctatattggttatacaaaaggctacacaatggttgatgaagccttacgtgatgcagatatccagaaaatagtaaaagaagcggtccttgaatctgcagcgggattggaaaagaaattcggattttccagtgaagaaatgagtagttatatcaacgatatgatcatcaaaagatacgatgattataatcaagagggcatcaatgatccgatcgctagagttgcacgtcagccgatccggaaattatctccagatgatagaatattgggaccggcgaatattgcttatgaatatggcctacccaatgatcatttgctatatggtgcggcgtatgctttaaagtatgatgatcctgatgatgaagaagcggtaaaattacaagagagtattcaaaaagatgggatcgagaacacgattgaaaaaatttctggacttcaaaaaggttcagatatgtttaacaaagttttagagtattacaatgctatctaagtcttcattagtaacccttacaatattcattttttaagtaagttgtgtttttaatgagttttctaaatatatatttttatgaagaccaatcatccagctaagatgattgggtctttttttgctttcgatatcatcagttatctttgcctattactctaaagaaaatttgtaagggttccaagatagaaaaagcatctggattaatgtaagtacaatcaaagttaagattcttcctcttgtggtagctctgataggcttctatttatcaattaaattgttataaaacaagtaactataaaaatagacatccaactatacgaaaacaaaaagaagcctaaacgaaaattaaaacaaaaaaacaattgcgtactgaagttttctatagtattatgaaagcgtagtcaaaggaaaacaaaataatttgaattttatacgaaaaagaggtttgagtatggaaaattatgagcgattaggcgatattgtatcgtatcttcaaaaaaagcaacgtgcaacaactaaagaattgtcgaatcagtttggtgtgacagagcaaacgattagaaatgatttatcctttctcgaaaaagaggagaaggttattcgagtgcatggtggagctaaaataactgagaatgagaccaaattcgatgatcggttgactgagaatgttgaagaaaaaagaagattggggaaatatgcagctaccttagttgaagaagatgacattatatttctagatggtggaacaagcatactgtatttgatcgagtgcctaccccaggacattcatattaaaatcattacagccagtctaccgatagctgataagtgtacaattctggataatgctgagatttactgtctaggtggaatgttaaataaaaaaactaaggaaatgtatgggccaaaagcattagaagatatttcaaatttgattgcgaataaagcttttattggaataagtggtttttcattggaaaatcaattcacagaaaataatgttttgtccttagaagtcaagcgtaaaatattaccaacagtcagtcaaagcatcataattgcattgccgattcaaagaaagagaataagatcggtattcaaagagcatttagttttgatgaaatagatattttgataacgggtacagaggtgtcaaaaaaattcatagaaaaagcaaataaatcattaaaagtaatgactatttgaaattgaaagggggtggaaatatgtacagcaaattggttataccagaactagttttctttagagaatcttttgatgatcaagaagatttcttcaaagaagtaagcaaaaaacttttagaattgggttatgtgacggaagggtattttaaggctgtggttgaaagagaagtaagctacccaactggattagcgctagaaaatatctctattgcgatcccgcatacaaatccagagtttatagttaaaccatttattgccgcgtatcatttaacgaatacagtcgcgtttacccaaatggcgacacaagatgtaacaatacaaagtgaattgattttagcgcttgggatcaaggagccacaggaacaagttgggatgctctcgaaaataattgaagtgcttaatgatccagagtttgtcaaggaatatcaaagtctttccaatcaggagcaattagttaagttgttaaaaagtaaattctaatagaaaagaggaataatcatgaaaaaagtgatcgtagcatgtggtagtggtgtagcaacatctcaaacagtcgcatcgaaagtgggacgtttattatctgaacgaaatattgatgcaaaagtggaagcggttgatattaagtcgttgaaaacatttattaatgatgttgatgcttatatctcaattacaccaggggggacagaagagttcaatattccaaaatttgacggaatcaaatttttgactggaatggggcaggaagaagaacttgaaaagcttattaaagcgcttgaaaaataaaggatttgaaaggagattactttgatggatgttcttgttaacgtgatccaatatattttggatatgggtgcgagcgtatttgtcccgatcttgatgctgattatcgggcttatcgctcgaatgaagtttaaagatgcctttagctctgcattaatttttggtgttgcctttgccggtatgaatcttgtcgtcaattttttactggaaaatgtttcgccagcagctaagggatttgccgagaatacagggattaatttaaccgcagtcgatggagggtggacaacaggagccagtttaacttgggcctggaaatatgccttcattgctttccctctagcgattggaatcaatgctctgatgttagttttaaaatggaccaaggtattgaatgttgatatgtggaatgtttggggaaaagcctttaccgcttgtatggtgacgttcatttcagggaacatctatttaggttttgcggtttgtgcaatccaaacagttgtggaattgaaagttggagatttatgggcacgagagatccaagaattgacaggaattcccggagttaccttacctcaccacatgacattgattgcatgtgttttatatccgattgataagttgatggacttgattcctttctttaatagaaaaatggatgtcaatacgttgaaacaaaagattggtatttttgctgaaaatcatgtcatgggttttttagtaggaacggcgctcgggttagtagctaaatatgatatttcggatgcgcttgtattaggtgtaaacgccgcagccgcacttacattatttccacaagtatcaaaattattcatgcaagctttatcaccaatttcggatgcgattagtgagatgatgaagaaaaaattctcaggacgtgaaatctatataggacttgattggccgattttagctggttccaatgagatatgggtgttggcgataatcctcgtgccatttgagttattatttgcagctattttaccaggcaatcaaatgcttccttttgcaggattaattaatctttcaattatcgttgctgcttatttgttagctcgcggaaatatgattcggatgattgcctatggaatcatcacgattcctgcctttctttatatcggtacctggtttgctccatggattacaaaactggcacaagaaactggggcagtaaatgtggaaccaggaacgatgctaggctgggcaactattgaaaatggcgaatttcgatgggcatttgcgagtgctgcacaaggaaattggtggggaatcatcgcagcggttgtatggttagccttgtttatcattttttataaaggacggagcaaagaaaatgcgaaacgttacgcagaagcaacagaataaacatttttttctaaaattgttctggtactgctctttgatactcgctctattgttattagtcagtggttattttcaaaaaaataccatttttacgatagtagctttaatcattggaatctcatttcgctatttcggagatactttagtattcacagatattaacaaacgaatcgaaaggagattaactaagtaaatgatttatacgataaccttaaatccagcagttgacactgtcttaaaagttagtaaggtactcactcgtggagaaaataatcgtgtacaagagcgcaccttagatgtaggtggcaagggaacccatgtttcttgtggtctttcattaatgggacaagaaaatatctgtacaggtatcattggtagcaacggcaaagaaactttgattggtctcttaaaggattatggtgtagaggctagttttttagaagttgaaaatgaatcagtcagagatacgttcgtagtaacagacgaaagtggagaaggctcctatatgattacggagtatggttttgaaatttctagagaactcattgatctactggtttccaagaaattaagagatttaaccactgaagatacggtcgttctgtcaggaaatccttcgctgcaaacttctacagaggtctttaattatcttcttgactttttggaagaacgaggcgttagattagttgccgatgtatcaggtgtgtaccttcaagaagtattgaaacgtgaaatttttttaataaagccgaatcaatttgaatttggtgaaatcgttggatcagaattgaatagtctggaagattgtattgaagcctatcaaaagaataaggacttactttcaaatattaaaaatatcagtgtgtcaatgggaggttcaggttctgtctttttaacaaaagaagaagtttacctttttactcctccgaaaattagtgttatcaatgacacaggatctggtgatgcctatgtttctggcttagtatacggcttacacaatcagtacgctattccgaaagttgggaaaattgcaactgcaattggtgctgcaaaagcagaggaagaattgagtacaggttttgacattcgacgagtagaagaattggaacaccaagttatttgtaaaagaataggggagtgaacgatgctctattatgaagaaagagtaaagctgacaaagtttgtaaagacgatgtatgaccgcaaattttcgaatgaagctggaggaaatgttagtgttaaagtaagtgataagcattttataatgacacctacgctggctagccaaaattttttgtgggatttgagaccggaacagattttagttatcgacaaagatgaacaaattatcgaaggaacagggaaagtaacacgtgaagtgaatatgcatatggctgcatttaaagaatgcaaacaaattaaatgtgttattcatgcgcatccctttaactctttagtttttgctagtttgggattagaaatgccgaacttaacggaagggacacaaaagctaggacaaataagctgtttagaatttgcaccagcgacaacgtctgaattgggtgaagttgttagagaagcagtcaaaaaagatcaagctatccccaaagcatatttgttaagaaaacacggtgtcttagtggttggaagcactattgaaaagacatttgatatgcttggacgattggaatggaatgccaaagttgccaaagaatatcttgtgctcaaacaaattggcgttaaaggaatagatgatctttcgatttataattataacacagtagaataagctattaaaatttatatgtacagatttaattgtggtgtttttgctatggcgaagtacttcaattattatctgtactttttatgatgttcaaggaagagttttaatgtatctaagcttcgttttgtacctactcttgagtacgagaaccaaagaatatttatcctaaattattgttttacttttgaatattataagtggaattagctatcactatgttgaaaatgagcactgtgaacaaagaaaagcataaataggatttaaagtgacagcatgtcaaaaaaagctgtctttttccgttctagaaaataaatttcgaaaagaattctctaaaatttatgtatgaattcacatttgagaataaactttgcttgttagcaagtattgattataaatgagcctgtaaaaaagtcatgtatagtactacttcatagtaagtagaaactaaatgagtagttgacatggagtacactctatcaaatatcataattgtgaaaaggggtctctatgtcttattcaaacataggagaggcttctaaagttactaaactatcaatactccgtttacagaaaaggaaattgaggttgctgaacaactacgtaaaggactaaagaaagaaaaagtcaattttgtttcgatttactctagtgattctggaagagcgagagaaactgcagatgttgttttagaagcaagtggacaaaatgaccttgatttgaataaagatgaacgtttaagagagtcatgtttcggtatacatgaaggcgatgctgatgataacatttggagaccagtaacgaaaagtttgggaagccagtcgcttgaagcgtggcgtgccagtgacaagtttagtgtgaaagaagggctcgatgagcttgcaaaaattgactcttctaaacaagcagaaagttttggaaaagtaagaaaaaagaatgcaggcagtactaaaagataccacagaagaaacagaagcagatggttgagggaatgtgctgattatggctcatggcatttccatcttatcaatgctctctgacatgacagaagatgttccttctaatggggctattcaaaatgctagtgtgacaaaaatcatatataaagatggaaaatttaccgttaacagtgtagcaagcactgaatatttagaggtcggagagaagtaatcaggacagagataacttccatagttaaaaaaattgttaaacaaagtgaaagttaattcaaatagtatttttttgtttattagacttaaatcaatttacaagtatatattatttctttgaagtccaatcatcttaaccggtgattgggctatttttgtgtctaaaggaggaccaatcaatgtttgatacgcaagaaaatcgctacatcacgagggtagtgaatgaacaagtaccaaagggaatacagcactgttgttttcagttgattgatgagaaggtaaaacaagccgagattcagttggactacttacaaatctttgagttcaatcgagacgaccaaagaggaaccattacgattgtccatcggcaagaagaaccattcttcattgattattctgagatccgaattaccaaagatttagtaaatttccaaataaaaaagctatgggtgattgatgaccatacacatcagacgatgttattaccagaagagtattaataacaaggggaaagcactaagtaaacaaataagaagtttctaaaatgaatcgaaagaaggtcttgacaatgacaaaccaaaaagtgaaatctgagcccaaaaagcgagtgaatatcgtttctttgcagttagtaaaggagtcatcagtattgtatgcaggaagaaaatgcaatagccctcaagcgttgtaccagttattttctccctttatagagcataaggatagagaatttttagtgatggcagggctttctcaaaagttagagccgaccgttatccagacgattcatattggcacgatcaatcaatcgttagcttgcccaagagatatcttgaaagctgcattgttatctaatagcgtgtcaatttgcatcgcgcataatcatccatcgggagacgttaccgcttcgctcgcggacattcaactaaccgctcgtttagaaaaagctgctaagttactacagatcaaattacaagatcatatcatcattggttcaggtggagagtacttatcgatgagagccgaaggatatatcaaggatgacgaatagccctaatgacgattactggtcattggggctttctttttgcagagaggacggattgaaatgttacatcaagcaatcaacatactaaaagaacaaactgggattgaaacaattgaaacagactggggatttgaatctgttactgctgaacgtgaagaactagacccagcaattattcagctaagcaacacaaaattaccagcattagttatgacacatttgtacgtatacgtggatcagaaatcaggcaaggattacgtggtgtacttcttgatggatattcacagtgagtacgaatttactcgggggttattaatagaaggaaagcttcaatggtattcaaatggtgagtccaatgattagccctgaattatggaaaacgatagctgaatgcctacaggacatcctattggcgttagagaaaaatgaaaggattggtgacaacgatgaagtggttcagattaattgcgaagatcgcaacagcagtgattgtaacattgattaatgcgcaaataatttaattaaaggagagaatcatatgattaagaaagaagtaatcaccatgcaatcagaggcatggtttagtgaagacagacaaagtaggtatgtattacggaaacaatggtacgaaggggtaaacgaagataaaactgggaaattagcggtagtgatcactatacgaccaacaagcacatctgcttttgtcgaggatttgactagtatgctaatcgaaaagaatatccgtcaattaggattcactggcttcattgctgtgaatcttttttcatctattcatgcagaaaataaagcgacctttttaaaagggtcagatgaaaatacattagaggtgatttcaacagtgcttaaagagaaacggattagtcaaattatttttgcttgtggttcgattatcgaaactaattctctggcaatggaacaagcgaagaagatattcaatctacttagttcaaaacaaaagaagatgtgcaaattactaattagttctaagtcagcaacaagtaaacctagtcatcctcttaacgtcaatgtaagaaaagaatggattttgggtgatatagatgggcttttccaagtggactaactcggacatttcaaagtcgaatgtccttcactttgtcacaagataagtcagactagaagttttattattattaatgaaagtactagcaataaaggaggtagtttatattggtaaaaaagaaggaccagatatttactcttggcatagcatctataaagaattggctcaactaattggaaccgaagcgacgatccaagtttaccaagagtttaaaggaacgcaggttcattttcctgttcgattgatccggccagatgcgctaccttatgttcttaacaatgagtacaacggaaagaacttacggaaattggctcattattatggctatagtgaaagacatctgcgaagaatcataacagacaataaggaaaaaaatgacgaaaatcatgtaaatgaccattcactaccatatctattggacttgactaaaaacgaaaaggggaaaaagaatgaagaatgacgaactaaaaacaaaattattgagtaatttgagcgttattggtgcagtacttatgatcgtaggattatttattggtaatttttactcggctgctaatggcgcctatgcgggtggatatgtcgtaaagggctacaatgtttttacgagtatatggtatggcttcttactggtactgattccaatcctattgttgattgcgccaaaaattgaagcacttagtaaatcagagaaactgattgattttgtactgccgattgtttctttggtcattgtgtttattttaaagggacaaattgctgaggctataagtatttttggctcttcaacaagttcatttggtacgggcgcgtatatttatctgataggtaatattctttgcctagtattgggagttgccaattattttggatttaaaacagatgcgaaaagcattcaaaaagcagtgaatgaaaagagctttgattctttgaagaaggatgatgacgatgaaaaagtatagtgtgcttattatggtagtgctgttagcttttactctttccggttgtaagtcacaaagtggaggaaattcgtcagtcactaaaaaagcagcagataagtatgaaaaaacatatggtgaagaacgcgctcaccaaaagaaagtgatggatgaagcctcttttaatcaaaatgaagaacaaaatgaggcggaatatcgtcaacgctcgaaagaagcagacgaagaattttctcaagccattgaagaccaagaaaaaaatagtcagcaagccactaaagcctatttagccatgttaaaagaagcggaaactttagctgaaaaagggaagttcacagaagcaaaagaaaaaatccgttacgccgatttacctggatcagacgaaaaggggcaagctgcaaaagcaaagggtaccgattacgaagaacaacttcaacaacttgaatggttgcagaagtacgaagaacaaggtgtcagtggattagacgcatctgttcgagaagattctagaaaagcaattgacttagaaaatggctctaaagtactggcaaagttaatcaaagaaatgacagagcaattagacaacggtcaaaagatggagaagactgcttctaacactacaccagaaggttacaaggcaaatgcgctacccgaactaactatcactgaaggtgttgattccacgggtacggtacaagctattaatggggaaatcaaattaaaaggagtttacagtggtggcgctaaacatctggcgatcaatgatggtggtaccattatgggcactgttgaagtagctagcgatggcaattttgaaatccatatcaacaatattgacaaattaccatggggatttgatgtgatcccaagtgatagtttaaaagctggacaaacgggtgtcatttcttatgatcagggtgacgggaaatattgccatattaaggttaaatagataaatatagaatgagcaatgagcttggacatgcgtttaaaagcgcaatggataagctcattttttcattggaaaatttaaaaactgttttttttattcgttggaactaagaataaaacccatgaagcaaccacctgacttaggattggtggttgcttacacggtttatttcacaaaaactatttaccaaaaagtagttcaagtaattcggttcctttggtatgagaatggtttttgtcggtagtctctaagaatggttttattagttcagcgtttgttagaatagttcccaaaaattcgttagcttgtttttgtttgtctttaccatttaaattatcgtattgttcaagattgattattcctgtttttagtgattgaatttcttcttctagaatttcaattttctctttgtttatacgagcatttgtatcataaagtaacaatgcgaactcttgtttttcacttccagtcatattggaaacttttttttcgatcgctgaagtagctgagatggggctacttgtaacatccagattcaaattatctgagatatccaattttttttcatattccttagaagtaggcattttttttgtcaagaattcatctacagagacaagaagtttctcatgttcttgattactaaaatcactctcaacgaaattggttatgacgtagggattagccactaaaaaatccttaaataggttgttacgatccagtgttgttggctcttcattttgaatatcgttcttgatacatattttgttgtaaaatatcagattttttacataatctttggttgcattcaatttatcttcagcacttgtagaagtggatatcttttcagagaaaatggaaaataattttgcctttctgaataagacctttcttcttttttcagttaattttactggatgactagcaaaatcatatacagacaatttcttttcatttgaatctaaaatgtaatcactactagaaaaatacatttcttcaggaagctttagatattcgtcaaaaacttgagtagctatagcttctgtcaactcaagggaatctttttttgatactttaagcagaggattaaagtttttaggcaactgttgttgttcaattttagtcaatataccttgatagacacgcttttcaaagccagaaaaaatattatataaaaattgtcctctattattatctggaaccttcagttcacccaaattaaaagccttgatcttagagactttcttatacatatcattaaataatttagtgtcgtaataagaatgggaatacttaattctgtatttaccatagaattgttcatcatcgtttacaaggtctaaaaggttttgattaaattcgacattgtgttttaaagaatttgatttactattccatgttgggaaattaccgtatctcgcagaccgattttcattttttacaatttttttggatgtatagcttaagatcaacttctccaatattcttcttatttcaaagagaaaaagggtttttccatcaccgaatacactcgcaattaatttgtcgtctctaccttctttatcgttaaagacttttattaaaaaagtattccgcttggttatttcaacaaaagtttttgaaaataagctgatgacactttcatcgtctttctcattcagtttttcttgaaaatgatagcgatactctaaagttcgcatagtatctttaatggtctgaagagtcaatccccctttctttgcttcgctagcatctgtttcactagcatctgtttcactagcatctgttttagtagcatctacttcactagttagccaattgaaataagcttcttttgagtatatatccattccttctctattcatttattttcctccaaatttttgtaattcgtgttcaaattatacagatttaacataaagcagaatccgatagtcataattgctttaatagaagtgtagtcaagattgtagcgtgattcaatactctctttaaatgtatagacgttgaactgggttttattgtcaagtttgtgttaaaaaaaactatttttaacatttagatggtgatggttaataaacctgctttaattggggtgtagccaaacaaagacacaaaggattttgactacattggaacatggctacttatttcatgagcaggatttctacagccagacgttttgctgtaggaacgtctgaagtcctgcttcaacgttgctgtgttccaaatgattagcaggaggagaaaacaatgatcgaaaatttagaaaaactttgtaagcataacagtgatccagaagccgattaccttgaaccggtcgaagtgattggtatgaaaggcaaaataacagaaaaaaactcttctagacttcaaaaactgttctttgaatcgtttatcaaagcagatattgcacctagtatgatcgtagttgaaggagaacattacgcagcctattttgaaaatcaaactgaaaattattctataccaacatcagtagagcaagttatcagggctatggcaaaacttgctgaactttattcagaagagttgtatggggtgaaagaaatttttattccttataacgaagaaaacaccattcttgcgaaaaactgtccccttgagaaacgattgaatcctgacaaagatttttataaagtctacggatcgaaacctacggatttatgccaaatcgtcggtgatatcaaaggtgggtggattgttggaaaagatcaaccattggaggttggaagtcctatgctagaaagtgaaagaaaaggtaagcagggcactgtatatgtgatggctccgaagcctgactgtccaccagagttttaccatgaaacgatgaagatgagctatgaaaataacttatttgtgaaggaggttatttgcgaaataaacaagcaactcttccatagaaaactgacaaagataattgactcaatgtctgaaaatgacaaactagttttgaatgattttcagaaaatactggagaaagttagctttgaagagttgaccttactgatgtgcaatacgtcaggtaaaggatctgttttaatttcgaatgaaaaaaacacgcagttcttagatttttggaccatcagcagtttacaagagttttcggctagcgtgccattcgtagataagattttggatgcttgttcagacttgtttaaatatgtttaagtttttaaacattcagatgttatgtcaagacaagtatgaagttttttatgactcaaatttgttagataacaaaataaatcagaatactttatcaatcctctatatggggattgattggttggataaacaggagtgctttcaaagtagcatttcccaacaataaaaggagtgattaaaaatgccaaactacatttttggcggtcaaagtacggaagttcttccaaggataatgaaggttaagcacattacgcatagtagcgatgggagaaaacttttcatcacaggtgatgagctagatgacacgggcaacatgattttgcagaattctcggcttgaaatctccaaaaaggggttaagccaaggcttcaattattcagtaggggaagcagtcggcgcatgcttatctactttcgggcaagtaataggaaataatacggtgaaaagctttgacctcgatcagttgatagggactgtctgtatagttttctaccatcaacaggttacaaaagacgggcgagtctatacgctgtatcgtgatttatttcctttgcaggtagtgcagttcccttggctcagtattcctgataccggaaatgctgacaaattttagtaggggaaaaggaaagccgttcaaaaaaatgtcaccctgagagggactagtaatactagtagtatcggggtggtagccttactggaaggagtctcatatggttttagactacgtaataatttcatttgtacgtgcaagtgtttcggatgtgtgcggttatctgtttgactatctgattgatgattttatagtaacggacagcaatatgcgtggcttccaaagagtgcttacgaatggcgtaatatttgttcattacgacaataagggaacaaaaccagtggtgctactggaaattcgttctgctggatgtcgtttcttagaagagcaggtgggacattcatggttaaactttttccaacaactaacgatgatagccaagcatgtttctattgaacgttattcggtgaagcgattggatgtagcgattgatagtttctccaaagaaacgttaactaccaaccgggcggaacgctatctaaagaaagaactattgacttctcgcttcaggataagcagaacgattaaggagtatcacgtcaaaacagctgaggttacaggcgatagtatttactttggcaaacgcacgagtgatctgcatatcgttgtttacgacaagcagttagagtctggcagtgattcttgttggtttcgggtagaacttcgtttccgtaatctctggggtgaaaaagtgttggcagccatattagatcagccagacaggttttcggagtttatcgcaaatgtcctgaaaacaactatccaatttcgatcaggtgttcataggcgatcagaggtaaggcgtcaaccattggcaaaatggtacgtagattatctatcctatgttcggcggcaaaccttgtatgggcttaattcgtgcgaaaaaaaagggggtgcgctctagatggttgattatgatgacccgaacaactttagctccctagaagaaacagaaccacaatgggtgtttagatttagtcattgctgatcttggatgacggattccagagctttcaagatcagctctatattgaatacggaaggggaaatgactatgggaaaaaagaaaaaatcatatcttgagatttatactgatggttcttataaccctgaaaagaaccaatatggatggggctttgtgactgttatagatggtaagcaaggcttctacaaatatggttctggtagtaatcctaattatttaagtagtcgtcaaatcggtggagagattgttgctgtattgcagggcttagactacgcgatttttaaaggatacgaggaagtctgtatctgttatgactatgatgggattgaaaaatgggctgatggtacatgggcggcaaggagcgcaattgcccaatcatgtgtataccttataggccaaaaagtaaaaaaaatcactgttcattttaagaaagtaaaggcacatgcgaatgatccatttaatcttaccgcggatcgcttagctaagaagggcgcaaatcaataataactataagagaaagaaggatgatgtaaatggtagtgattaaaaaaccaggcatgcaaacagaaagtaaagaatcaagcttcaaggctggtgtagcagagaatcttaatgatgtaagtggtaatggtactgaagatacagtaagcgatgggcctgttatcgaaaaagaaaaagcaatcgatgatcaaacgaatgacaaacaaccttctggtgattcggtaggctcaaaaataaaaggatgggaagaaacaatgtcagcgaaaacatctccacgaacagtaagaacgcttaacccaaattctacatcttggcgcgtacacgaagtaattgcgaattacgcagaacaaccaaatcttgaatattgccaacgataatcaacgatcagctgaaaagcgagcatggattaacagattccgatatcagtagctattactatgccaaaaaaaaatccggttatttggacaatcgggaacttagtcctaaggaatccgaaaaaatgaaaaagtctgttcgggtttggtggactaccaatcttttctgggaggcttatgaagcaacaaaggaacggatcgcaaatgaacaagcgaaacaatcctctgtttcggtccccgttgttgaagaatcggcaagtactggtaacgaaagcgaataatgcattcaacaggttttccagtatcaagtaatcaaaataactgtaaaggcggtaattaaatgaaaaaaacaaatgatcaaaaagtctatgaatatgtgtatagagtatacggggaggatcccttcaccacagagcaaatttacaattcagcagaggttatcggtgttaacccagcaagcataggtgcagcactaaatagcttaaagaaaaaaggattgctgatcaactacggtcaacgggaaacaataaatggacgcatccaaaagacttggcgagtcgtaccagttaaatagaaagtctagtggtaataagtcaagataatttttcaaaagatttttaaaggtagttaatttttgaagcgcactgaactaaacccgaccaaaattaaaaattttttcgggtacttccaaggattagcgtcaataacatactgttatttatctatcacgctccttggtggcatatagagttgatggttacgtagtagcgtatccaccagacgcgtaaattttcttgcggttagtacgatggctcgtttgtgtttatgcttgggtgtttcagcgtattttttcttataatacgcatggtactcaggctcgtatctccttacggagttggtggcttcaactagataataacggagataacgattgcctcgtttggccataggagtattttcatactcagagttacctgattggttctgtcgccaatataaaccggcatatttagccaatttgctttcatctgaaaagcgattgatagggccaatttcagcgagtatacccgcagcataaacaggaccgattcctggaatactggttaaacattgatattcaggtagcacaacgactaaatcgtcaatggctttgtctaagtctttaattaacttttcaagactacgaatttctttggctagaacacctaaaacaatatctacagagtcctgatggacttttcctaaccggtaggaactacgtatggctttagaaattgcctttgcaattccttcgggatttttaaaacgatacttccctagtttttgaattaggttcgcaaactcttctaatgacagttcggcaagttggtccattgtgtaatcttccgtcattagagttactaatgtggcacttaaaacggatccaccttctgcttttagttctttagaaagcgtgttgcatttataataaatgttttcgataaagtgttgctttgtacgaaccagctgtttaattagctgataacgcgttctagttaagtgttggagggcaaggtattcttcctctttaatgatggagttgacttgcctttggatgcgaaaatagtcagcgatataaaaagcatcaatttgatcgtttttgttttcttcaaaaatatcacgatactttttaattttatttggttgttcaactgaaaccataaggttcaattgatttaactcaagatcttctttaaaaaacatagctggatgaaagctatataaagatgtggcctccattccaatcactaagctctctatctcaaatttttgagaaaattcgagaatgtattctttgatctggcttgcgccaagttgactatttccataagatgcttcttttaaaacagagcaagttgaatcgtctgtcataaagcaagcatctaatttttcagaactaacgtctaaaccgacaaatagtttcatgtggaaggacctcctttcattgattattcggaaattgcttgggtactgtgggatatcccagaatcacgttgtctaacgacagcctcgcataatagagtttcattcattaaacctctaagccacccaatctctactaggattggtagaggtcaatggactcagctagtgtgttggaggttataccaacggttcgggtcacagactttctgtcgcagtaaaactgcagaaggtgatagcgtcttcccgtaagtcctttccaagacttattattcaggaatatcctacagtatccaagtagtaatcgttattttatttaaacatattaggaatagcccctaagggcgattgaaggaatgaaagtttcttcaaaatatatattacgaaagtggtgattaaatgaaaacagaaaatagccatcatcttccactagatgaggagtatactcaacagtttgaacctttggcaaaggaattagccaaagggatgatgtactatttacaaccatagaacacacgtgaaaagggggacagatcgtcctctttttcattagggaggaaccaagatgaacgtggcctactgcagaagctctgtttggaaagaagaaaaagtgtctttacagtctcagaaagacctgtgcgaaacagaagcaaaaaagaccaacttgatcattccaaaggagaatttcttattggaaaaaggacaatctgcacgaaatttgaatcgtccacaaatgaaggtattactagactggattcgctcagatgtactggatcatggtcatttgttcgttcctagttacgatcggctgaccagagaaataaccgacttaaactatttactcaatctatttgatcaacatgctattaccgttcattcggtgaaagaaaaaatccctgttacgatgtcacgctcaacacgtacattctatatctattcgctaggtgcagtggcccaagcacatttagagacgagccgacaacatgctttacgtaatagtgatcgacgaagaaaagaaggaaaaccgattgggagtgccccttttggatatacctatacgaaagaaaaattgattctcgttcctgcagaaagtgacatcgtgaaggacatatttgacctctatctttctggtttagggtacaagaaaatctgccaattattaaacgggaggggattaacaatatatggaagacattttttggatttagatatttatcgaatactgggaaatcaaacgtatgctggatttttaggaaaaggaagcgccacttacaaaggaaatcatcaaccgattgtttcactcgaaacgtttgaacgtgttcagcaaatccgtaaacagcgacaacaacctaagaaacatactgctcagtatcctttaaggaggaagttgctttgctcatgtgggtggcacattggtgtgcatacttacgaaagcaagaatggaaaaataaggcgttattatgagtgtgcgaatcccattcatcgtgaaaagaaattggctattcgttggtcagcagctcatttggaagagatagttttacaggcaacaaaaacttttttgtccaatgagaagttcttagatcaacttcttcaccaaataaagcatcaacaagcctccaagcagaagcaggaagaaaaacaacaagaatatcttcaacgccaaaagaaaaaactgtttttacagtacgaaggacaacgtattgatgcgaaagaatttacgcagcagctatcacaattgaatggagaaaaagtgctgactggcaatcgctcaactattacagtgagcgaagtcaaaggtttatttgttacggacagcaatgtaccagatgcatttttctttcaattgattgatcatattcgattgtctgatttgaatgagctacaagaactctatcttactaaattaccagaacacaacctactagaatggagtgaagaaaatgaaagaaagtaaactatcacctaatcagccacaactacttaaccgagaacaacgccgaaagcttggcgtgaaagttgctgtaggatatgtgcgtgtatccacggatcgacaacaaaaatttggcatcagcctagtgacgcaagagacggagattaaggaaaaagctgagagtttagactatatttttggtcaactttacgtggatggtgggatatcgggagcggatatcgatcatcgtttgggaatgcttcaattattagaggatgctgcaaaaggcctgtttgatgcggttttcatctattctgtttcaagagcaagtcgtgatttggaagattttctattaattgtcagtacgctagaaagttataatattgaattaatcagccttacggaacagttaaatgaggagggttcgtctggaaatctaacgagaaacctgtttgcgatagttgcccagttcgaaagagagcgtggcagcgagctgacggctgagggaatgaatacgttagcaaaagaagggcgtttcactggcggaaaaatgctgggatataagagtggcatagacgaacagggaaggaaaactttgcttattgttccagaagaagcagagatcgtaaaatacatcttctctgcatttgcatcaggaaagggctatctagcaattgctaacgatcttaacaaacgtggtgctaaaactgttaaaggaaacagctttagtgccgattcaatcaaaacgatcttgacaaatcaaaagtatggcggtgttattcaatacggaaagtatcgacagtggaagaaaaaacgccgacgtggtttgagcaatgacgtgattgtcacagattctattcacgaagcaatcatagaaaaagaacttttcgaaaaggtcaaagaacgcttggaaaccgaatcaatccaaccgaaatggaaccacaggggagagaatctcctcacaggaatcgtaagatgtcctggttgttctggaccaactagcgcatcgaattccacgaataccttgaaagatggtacgaagaggaaaacccgttattattcgtgtacaaatttcagaagaaaaggaaaggctggttcgggatgtaatgccaactctattcgcgctgattatattgaaaagtttgtggctgacagattagtagaaattattactgtacctggatttttagatgtgctagtgagagaaatcaatgcaagaattcgcgaagaaatcaaacctttggaacaagaattagcagtgcttgaaacaactatccaagatattagtgagaagcttgaaagctggaagcaatttgaggccattgcaaatgaattcagtgaggatatcaaccaaagaaaggaagaattgactgaacagttgattttttctaagcagcgagaacgggagatactttcagttttagagcatcaagatcaactagtagaagttactgatatcgagaaaatattgaaggctttaaatgagatgctaaagcatgcagaaaaagcggtaatcaaacaagtctatcgttccttcatcgagaaggtcgagtttgatccattgaacaaagaagatatcagaattaccatgaggtttgacgaaaacgtcatccaacaactaaaccaaatataccaagaggctgtatccgatcatatggatacagccttttttgtgcttaaacgtccatttacattgatcgtctaataactcgctatgcagttagtttgttccgtaacgaaaccctagctattctatgtagctagggtgattgttatggaggggcgtaacatcaacatggatacttgtaactctaggccaatttttttgccatcaaaaacacctaaagcactaatcctttttatatagacgtgatgacttggtgtaactatcgctaagctttcttgcatgggttattgatattctttattttgaaacagtgctttcaaattttgttttatacgctggatatttagaaatttcatactcaaatggtttatgttctttagtaaacccaatactagtaaaaacaaaaacgggttcatgatcttctagttcaagatagagattttccagattatttggtggagtgacctcgatagaacgcttagcgaaagccaaactgatgcctttatcctctaaaactgagaataatgattctttagaaaaatcatgttcgacgatttcaggtagtaccgctaaagggatgcatgattttgcaatacaggttggaagatcatcgatatagcggattctttccaaaactaaaataagatctcccggatcaatttctaaataagcactaatcgttgagtctgctggtacgactgtttgctggagaatctttgagctgatctttcttccttgttgaatagcatcttgaaagaagccgataaacgagtctagttcatggtcaatatatttttccgatgtagctttcgttttgagaatgtagccgcgtccttcacttttaatgatccgttcttcttgttctaaagttgccaacgcttttctgacagtaggacgactcactgaaaattcctttgctaattcacgctcagaaggtaataaatcggaagttttaccagttgtaatatacttttcttctattttttcctttactttatcaaaaatcattatcattcatccttttttaccaaggtatgataataattttaccattcttttgacttaaaatcccaaatttattttccatacaagccgaaatggctaattttccccaagagtaccccatgtagcgatcgtagtagctgggcgaagaacctcgttggagatatgccatattcatgtatttagtttccattggtaagtttttcgtaaggaattcgattgttttttgtttgttaggtaacccctctggcagaagtaaaattggtgaatacataggcgaatcgtattttttacacaattcatgtaaatattccttgtcactgcttttaatccacaatgttgctgtcgcaattgctgcattctttgctaatgcgaagcagtttcttcccattacttccataatcatgatgcggttgtgggaattagcagtatttgtcagctcgtcagttgccttgatcaatgtattcaaagcggtatcgaatcctagtgtataatctgtctcgggaaaatcattatcaattgtaccggctatgacagaaatattgatatctgattcctcttttagtaatgctgcacctttgagcgacccgttgccaccgataacgatcaatgtttctatcccttggttcttcaggttttcgatgatctttcttcttgttttggcttcgcgcatttgttcaaaacgagcggtaccgattgaggttcctgctctacttatatcaatagcgttcgtctcaatggagagcgtattatcctcataaattccttggtagccatttttgaagaatacttcctctaagttactatttgcttcaatcgtttgtttgattccgagaatagcagcattcatcccgggcgaatcgccaccgctgcagattacgccaattttcataactaatactcctcgccttagtttatttgttgcttgtgtttagaaaaatatagtgcaagtatcctctttaaaactaaaaagtgtcaccacaaagatatagactttgtggtgaacacctaaatatctgcttgttttttaatactccatcttcttgtaataacgacgggttgttagaggatggtttctttcatcttctaagaaggcgctgatacgctcaaatactgttgctaagacaattgatgagatgatttttcgtgtttctgcagaaattccaggtagctcataatctttggtgtcaattacggcagaaacatcggtaaatctaggaacaaagtttttcacacgttctgtgagtacccgagagtcatcctcaccctccgttataatcacacttacccctttttcaatcaattcaagtgtaccgtggaaaaagtcggcggcgtggacaggtcgtgttttaatccattgcatttcttctaggatacacatgccataatagtaggcttcagcaaagctatcgccagcaccagtcaagatgtgatatggtgtctctttatgttgctcagcaaaggcttgggccattggttcagcctgttcttttgcatgaactaatgcttctggcaattttttaaagtcctctaagtatgtgttgtacgtagcttcatcgatttcatttcgctctctcatcatgaataaagcgatcatcagtccttgtagataatagttttcggaagaagtatcatctaatacatcgttgtagacagagtaagttgcagcttcttcaaggggagtgttaggacttcccacaagggcaagggtttcaacgttcttttcattgcaataagctactaattcaagtgtttcttttgttgttcctgaaagtgaaggaatgacaacgagggatttttcagaaaatgttttattcgggtgaatcataaattcagctgcaatcaagcgatgaaaagaaaaactgcttcgagttcgtgcaaattctactgttgaatcaaacaaaatacctacgcccccggaaccaatgaagtaaatctcttctaaattcgcagctaagggctttaaaatctcagtaatctctttattcgctgcaactgctcctttttgtgttttcaaaaaccgttcctgatcaaaattaaacatgtaaacactctccttttttaccaatggtaatttattttgcaaaacaaaaataccacaggttaaaattcatgtcaacactaatcgaataaaaataccgttggtttaaaaaacacagcatttttttccagaatcaagtatattaagaataagaaggttctaaaaggagagattatgatgaaaaaaaggattctgaaagaactatcttctttagtgagaaatagcgattttccacgagagatacctgaaaattgtaatgctcagtatattgcacaaatgtttgatattcagcgtaatacagcaagtaaacatctgaatgagctagttgaacagggagaagctgtaaagataaatggccgtcctgtattgtttattccaactaaattgttgaaagaacaagaaatgtttctgggttccgaaaaagaattttcaacagtcgcagaatttaagaaacgtttgattggaaatccgaagaagaacgttttttctgatcttgttggttatgatcagagtttaatagaaccgattcagcaagggatatcagctatgaaatatcctgaagggctacctatcatgtatcttggaccatctggtgtcggaaagagttacttagcggaaagactggcagaatattgtcgcaaaacaggcattattgctgaggatgctccttttatggaattgaattgtgcgcagtattttaataatcctgaacttttgactagccagctatttgggcatatgaagggtgcttttaccggagccgaaaatgaccatatcggtattatcgaagcggccgatggtggcattgtttttctcgatgaaattcaccgcttgccgccggaaggtcaggaaaaactatttacccatatggacaagagtgttttccggcgagtaggggaaagtggtccgtggcgtaggtcaaaggtacgctatatttttgcgacgaccgaacaaaaagaggatttttttctagatactttcaaacgacgaattccctttatttgtacgttgcctacctatcaagagcgtaaatcaaatgaaagaaaagaaattattttccatttattagaaaatgagtcgtcgttaatccagaaggaaatcctagtttcagaggctgccttaacttatcttattcgactgaagctaccaggtaatattggtgaactggccggaatgatcaaacaaacgattgctgggaaaattgcatatgaggatgggaaaaaatatatcgagattcacattgctgatttgccgaaaagatatttaacttttgagaatcaacagtatcctaaccgtgtttatagtcaaaggttctatattttcagcaacggtaactatgtacatgatgaagaggatacttctacttttgcgagtcgcttgcagaaattgtttaataaaatttttacttgctatgaaagtagtcaaaaaggcagcatctccgacgaggagtttcgccaaatcaccagaaattatttgtctgagttcaatgaacattttatctatgaaaataaaacggaacttttaacgaagtattatttaccagaattgcaaaaggtcgttcaaaaaattgctcctagtttattcattcatttatccggctatactgtccaatcgattgctaattatttagccatgcgagatccttgggagaatgcattaccagatgagacagaagcgtatatcgaaaagttgttagaaaatcttaaacaaaagtacttaagagacctagatatttttctggtattctttgaaaattcgttagacactaaattaaccgtgtgggatcagctgtatatcacgctttgtattatctgtgatacgaaaagcgataacaataagatcagtgcaattatcttggctcacggttttgccactgctagcagtattgcgaatgtcgcaaatcgtttagtggaacagtttgtttttgattcaatcgatatgccattagatatttcggtcaaggaagtaattgagcgcttgatccactatatcgaattccgtaacccaaaagagggtctagtgatatttgtagatatgggaagtcttgtacaaatcagaaaagacattgagaatttggtggaagttccgacggtcatcataaataatgtgacgacagaaatgaccatagaaacagctaatttgatccaacaatccggtgatatacaaaaaattgtcaaagaactacctttttctcaatttgaaaagcaggtgatcttcccaaataaatcacgaaaacgcacaattctagtttcttgtagtaccggactagggacagcaattaaaattaaggagatgctggaaagaaatttaccaaagcaattaggaatcgagttcataccttatgaaaatgattcactaacagatagcaaacaagtagattttttgcttaagaccaaagagattatcgcaattattggtactgacgatcccaaaatcgaacacattccttatatcacgttagaagaactatttgatggtgaagtcggaaagctttacgaagtacttttgcgtttgtatggtaaagagactgccgattcgattaatgagaatattgtcaaaaacagtacattgaatcgcttgatcgatagtctgacgattttagatgccgaaaaagttgtcaatcaaattgaggattgtttgaatgagtatcagttgttttccggtaaacagctatcatcaatgagcaaaatcaatctgtatgtgcatattagctgtatgatcgaacgtttgatccggaatcagggagttagcagttttccagagctggagatttttctcaagaataatgaacaggaaatcaaagcagtgaagcgttcattaaaaaatatcgagggtctctataatatcagtattccgatagaagagttagcctatgtgagtaatatcgtgatcaactattaattgaaattttagagtgacactgtttgcaattattaaacagtgtcactttttgttttacaaaccgcttgaaaacaggggtgacagattttggcacagtcattgcatttatcaaagtgaaaggagtagaaaggatgagaagaattttatgtatgagtcacggtccactagcaaaggggatgttggaaacattaaaatttattgttggcgacgtggaaaatatcgatactctttgtgcgtatgtggatggaaataacgatgttgagcaaatgattgatcgctatttatcccaaaatagtgaaaatgaattgatcgttttgacagatatttttggcggaagtattaataatgagtggctgaaacgtttaccaaagttggagaatgtttacttagtttctggtgtgaacttaagcctgttagtagacatctatctgaagagccagacagctaccacattcaaactaccagaagtcattgatcacgcgattcactcatcatcggaggcgatgaagttttgtaaccgtcttaattatgaacaggtcacagatgagttttaactcgagaggaggtggggaaatgatcaaactagtgagagtggatcatcgattgattcatggacaagtggcattaacttggacaaatgctatcaatgcggattgtatcctagttgcgaatgatgacattcttgatgatccagttcagaaaacgacactcaagcttgctgcaccgcataatgtaaaggtggtcataaaatcgattgaggattcaattgaagcgatcaatgacggaaagaccgataaatacaaactatttattgtgacaaagactatcgctgatgcacatcgattggctcaaaaagtagaccaaattaataagattaatatcgggagtgtgaaagaggcaccaggtagttccgcgttaacccatacggtttttgtttcagacgaggacaggtcggagcttaactcgatggttgctgaaggctttcacgtctttgcgcagcaggttccaacggataaagcagttgatttaagcaaattattataaaaaaaggagggaatatcatggatagtcttttggtacaagccattctattggccattttgactgctgtgattgtcatcgactggatgactggtacaaacaatctttctcgtccgattgtaacatcagttttcgtcggtatgatcatgggagacctgaagatgggtatcatgatgggggcaacgttagagttggcctttgttggtgcgataacaattggagcagctcgtccgccagatatcgtttcaggagggatattaggaactgcttttgcaattgcaacaggtaaaggagcagaatttgctttaactttagcctttccaatagctgctttgttcctattagtcgataacttacttaccttactcgttttaccgatgattgcccgtaaagcagacacttttgctcaagaaggaaatctaaaaggtatctctagaatgcatgttttaggatttattttagttaaaagtttgccacgagcactttttattggattctcattttatttaggaagtcctgtgatggaacgtattttaaatgcgattccaccgtttgttcaagatggaattaacattgcagcaggaatcatgccagcccttgggttcgcgatcttactacaaatgttgcttaagaaggatgttttggtttatttcgttattggttttgcgatgttcagctacctgaatgtacctattctcggcattgcaatctttggtgtatgtttggcctatatcatcgtaacaatggagaacaaaaataaacagaccgtatctaaggaggtgtcgatcgatgatgacttctaatgatggagtacttacgaaagatgatttaaagaagatctgtattcgttcctgtgcccttgaggcttcttggaactttgaacgtcaacagcacatgggctttgcctttgctatgatgccggcattagaaaaaatctacggaaacaatgaggctggaaaaaaagaggcagctcaacgtcatctggagttctttaacacggcaccaccactatcaacatttatcatgggaatcgttgtttcaatggaggaggaaaatgcgaaaaatcctgagaattttgatacagcaacaatcacatcgataaaaactgctttaatgggaccattagctgggattggagattcccttttttggggtacacttttagtgattggtattggtgtgggtgcttctttttcaaaagaagggaatattttaggtccgattctatttctattaatcttcaatgtgcctaattttctattacgttattttggtgtgatgcaaggctacaagttcgggacaaagctcttggaaaatattgaatcctctggtgtcatgaaaacattgacccatgcggcttctattttaggattgatggtaatcggtggtatgtctggaagtatggtttcaattcaagtagccggttcgattggacaaggggaggaagcgactaaaattcaaagcatcattgatggcatcttaccaaacatgctttcactcctttgtgtactacttgtttattggatgttaaaaaaaggatttaaaacgacacatgtactatttggaatctttatttttgggatagtagcagctttctttggcttcttaactacttaattaaaaatcaattgaaggagagagaaaatgttaaactttgatgcaacagaaatggaagaaaagggacagcggatctatagtatccgtacagaggtcgaggagattgctaaaaaggtgcatgaagctggtattagcaacattttctttacggcatcaggtggttcagtggctgtcatgcagccatttgaatatatcctaacgacaaaatcaactattcccgttttttcaatgacggcagctgagttagttttaacgggacataaacaattgaatgaaaaatcactggttattttgtattcaaaatctggagacacaaaagaaacaatcaaagcagcagaatatttaaaggaatccaatattccaacagtaggcatcgttagtaaagaaaagacaccactagaagcactgaccacgtattcaattaattacttagatggacgtccacaggagatgcctttatacttcctgattatgtcgatcatgaacttgaacggtgaatttccagagtatcctcgctttgtagaagagttgaagcaattacctaaagcgctgaatgctgttcgggaacaggcggatgaaaaagggaaaatttatgcagaagcgtttcaaaatgatccctatcaaatctggatcggaagtggaaacttatggggaattacctattcgtattcgatgtgtgtattggaagaatcacaatggctgcgaacaaaatcagtctcatctccagaatttttccatggtacgctagaattggtagaaaaagatgtttgtgtaactctattgaagacagaaggagaaacacgatctttggatgaacgcgttgaacgttttgcgaaacaatatacggataagttcactgtttttgatacgaaagagtatgatttaccaggaattagtaccgagtttcgtgaattcttctgcgccccagtgatgtgggcggcgttaggcagagtgagtgtgcatttagagcacattcgcaatcattctctagatactcgtcgttattatcgggttgtcgagtactaaaagtaggtgaaaagatatgtcccaatatgtagtaggttttggtgacaatgttgtagattattatattaaccataatgtaaaatatcccggaggtaacgcagtaaattttgcagtcaatgcacgaaaaagcggagtgagatcctattatgtcggtagtatttcttcagatatagatggagattttttgcggcagaccattgaatctgaaggtgtagatatttcttattgtggtacttcctcgggcccaaccgaacaagcccatgtcatcatcaaatcaggtgatagagagtttgtggatggtgtgcgtggtaaaagagagacacccgcgctaacaaaagaacttgtagaattactaaaaaatagtgctctggtccatacgagctgccacagtcgaacagaggaaaaaataaaagaattgaaagttttaggcgttaaactttcatttgatttttccgatgttgataaataccggacaaatgactatttaaatttagtttgcccattcatttatatggcgcaattttcagtagctggaaatgacgaagtagagatccatcgtttgattagtacctgtcagtccttaaaggtgccgtatcttttacttacaagaggtagtaagagtcccatttttattgataataaaaagaacaagacttatcgaggctttataagaaaaattgattctcctcacgatacaatgggcgcaggagatgcatactttgcggcgtttgccagtaattttgtcttggatagtgaagacagaacggatgaagaacacattatcaactgcttccaaaaaggagcggatattgcataccaaacgctaatggtcgatggttcctttggatatgggagaaaaattgatcctgatttgaattaaaagaatatcttgatcgtgatctgactatcaaaaaagtagttggattacgatttttttgtttgtatagtagtatatactgaatctatttgttatacagaaatcgttgcgatttagagtataatgttatggagttagatgctccatatttaagtatttagaaagtagaaaatttgtaagaacccttattataagttatgtccttgaccatagcattttttgtacagataacgataaggatggagtaaaaatctgaagaccagcgaatgaaatatatttcaaaatgttaatgactgatttataaaagatattttagtctaagtatgggggttcatttttgtttctataatgtgtcctactaactataaaataaagactttttagcaaatcatatttgtgataaaatactgtcgacgaaattaaaatagtgtcgaggaggtgttatgatggaagaattaaaagaacgcattgtcaattatgttacagagaactctgagattaaaactaaatgggaaaacaataccgcacagaaaatagctgaaaaattgaatgttagtcgtaatattgtctctcaatatttgaatgaattcgtaaaagatggagaatttggaaaaatcaatacccgtccagtaatcttcttttctttaccagagaaagtttcaactcaacaaatttttagctcttcagaggaagcggaaaaatggtatgatagctcttttaggtttggaatagaaagggttatcggaagtcaaggaagtctgcgaaatataattgctcaaattaaagcagcaatctactatccgccaaatggcttacccattttacttcatggcgagactggaactggaaaaagctatttagcaaattatgtatataaggatttgttggccaataattatatagaagagaaggcatctttcatttcagttaattgtagtgaatatgccaataatccagaacttttcttgtccaatttttttgggcatgtaaaaggcgcatatacaggagccgaagatggaagaaagggtttagcagaattagccaataatggagtcttatttttagatgaaattcatgcattgagcaatgaatgtcaggagaaactttttcagtttatggatacggggaaatttcatcggatgggtgataatgaaaactggtacacatcaagttgctggattatatttgcaacatcagaaccacctgaggataaactattatcaactttgttgagaagaatacctgtaaagctgacacttccaacattagacagtcgttctctttatgaaagaaaacagttaattaagatattttttaaatcagaagaagaaagactagcaaagaaaatactgatatctcaacaattattagattttttattaaactatcgctttagtggaaatgttggcaatttgaaaaatatcattcaattgacctgtgccaatgccttttctttcttagatgatttggaagaactttatattcagatgtatcatttaccacaatgggtgaatttcaacggcatgaaggttatgaaaagacagaatgaattaaaatatattcaaatggatgatttggaaaaagtagacgaagtttttaatatcaacgaacttatagagtatctttatcaaacgtggaagaaagacactgataagcagcagctttttgagaaatatgatagatattttagacaaaagaatgttgatatccaaaataattcagctttaacatatcccacctatcaagaaattcgatttagacagtatgttaaggaaatagagagggattttcaaatagaatttgactattattatcttcaaataacgtcgatttttttgaattcttggatttatcaaattcaattaacatcggacgataaattatattccttcatcaatgatattaatagttggtgtagtcgagaagttcaattagtcaatcgttttattcaaataggggatatttatttaacaaaaattcaaaaaaatattttggttattttatttaagttaatgtgtagtaaagaatttcagcaaaaacgtttagcactgattttggctcatggagatctaacggcaacctgtatagcaaatactgctaataagatcgttgggagatatatatacgacgccattgatatgccactaatgacttcaagtagtgagattgcagataaaattaatagatacttacaagagtgtaccggatatgaagaaattattttacttgttgatatgggttcactagagaaaatttatctaaatttggaactagacgctcaaaaaaaattcggactactaaacaatgtttcaacaagaatggctattgatgttgccaatcagatattattagatttaccgcttaaacagattcttgaacaagtaaaagaaaatcaaaatgtggattatatttatgaatcatcaaatattaagaaggatatgattgtctgttcttgtgcaagcggattaggcacttcgtttaaattaaaaaagatacttgaagatagctttccaagggatactgatcttgtcatagaaacgtgtgactattactctttagcgaatgaaaactatttatcggagcttcgtaaagagaacaatattctttttattgttggaacactgagtccacatctagaagatgtagaattcttttcaattgaagatatgattttaggaatgaatataagtaaattctccaatcaattgaatagacactttaatgataatgaactgaaagttttaaacaagaatattctgaaaaattttagtctaacaaatttaatggagcaattgaccatattaaatccgactaaattattagaacaggtttcagatgctatatacatcttacaaaatgatctaggaatttcatttgataataatacgtgtttcggattatatgttcacattagttgcttaattgaacgattagtaaaacaaaatactttggaagacgaaatttatttcaatgaaacgagtgaggaatttcaaaaatttcagacatattttaagcaatctttcagtgtcgttgaacattattatagtgtcgatatcccgatccatgaggttaaatacgtttatgattatgtaaaaagagcttgatttatcaagctctttttgttttggcatggtaattgcttgtaaaaaaatgaaagataaaggaggaagtatttatgagtattgttatgtcgagaattgataaccgtttattgcatgggattattgtcacgcaatgggcaccaatgtctaaagcaaatagagtgatggtgatcgatgattctgtcgcaaatgacgacatccaaaaatcaagtatgcgtttagctagacctgctggaatggctgtatcaattatcactgaagaaacagcgattgcgaattttaaaaaggggaaatacgaccaggaaaaagtatttgtcatcgtgaaagagccggaaacaatccttcatttagtagagaacggtattagaattgaccgactaattgttggcggtactgttgttaaagataatgcattacagctatcttctagagcttatgcctcagatgaaaatatcagcacgtataaaaaattgttggattctggtgtagaaattgttacacaatttgttccggcggataaggcacaggaaattcaatcaaaattaggataaaggggtaaggataatgcattttactatttttcaaattattatgctgactgtattagcatttattaaacatgttgattattatgggattccgatgatctttgtaaattacgcagtcttttggggattattcacaggagttttgatgggtgatataaaaacaggtttgattgttggcggtacagttcaattgatgtcattaggagtggccggttttgggggttcatctgtaccagactatggaacgtgcgcaattattgcaacggcattcggtagccagcttggagtagaagcaggattggcaataggattacctgtaggtatgttaggggtgcagctagatgtaattgtcaaaatcttaaatggttttgttgttcgcaaatcacaggaatacgcgaataaacgagaatttaagaaaatgaatagtgttttgtggttggggccaattttctttggtttatctgcagcaattccagtatttattgccgttactttagggcagtctgctgttaattacgttttggatgttttacctagttggtttatggatgggttaacgttagccggaaaaatgttgcctgctgttggtattgcgatgttgttacgctttatgcctacaggtcgatacatcagttatttacttgttggatttttcttagccgcttttttgaaggtacctattattggagcggcgatcataggattcgctttagcatttaacgtgtatcatcgagctgaaaaggatgcacaaatcactgcttctgtgggagcttctgatggcggatttattggggaggatgaataaaatgagcgaaaaatatcaagtaacgaaaaaggatcttaggaaagcgaactatcgttggttgatgtcagtttgtacctttaattatcaaacacagcaaggtgcatctgtgacttacgcattgtcacctattttaagaaaattatacaaagatgatgatgaatacatcgaatctttaaataatcactttcagtattacaatacacagccttggctggccgctattattttaggtgcttgtgttgcaatggaggaaaagcaaggattagaagcaaaagatgcgattaatgactttaaagttggtacgatgggtccaattgctggtattggggattctcttttgatgacgatgattccaaccatcatgggatcaattgcggcttatatggctttagaaaataatcctgtaggaatcttcttatggttcattttaatcatggttatcttctttttccgaatgagaggctttgaatttggttataagcagggaatgaagattgttactgaatacggtgaaaagattaattatttaactgaagctgcttcagtattggggttaacagttgttggatcattaattgcttcagttatcagtgtttcaacgccacttaaattcacttttggtgaagttagtatgaaaatccaaccaatgttggacaaaattttaccaacattaattccagtaatgattactgctgcagcatattatctacttagtaagaaaaaaatcagtatgaccattttgattctactcgttattgtttttgcgatggttatggctgcatttggaatattagcgtaaaggaaaaggatttgaattatgagaagaatgatcattgctagccattcaacactagctgagggttttaaagagacactagagtttttaacaggtatgcataatcaaattagtagcttatgtgcatatgtcgaagaaactgatgatatagatgaacaaattaaagagttagtggagactacagacgaaataattgttttaactgatatggctggaggaagtgtaaatcaaaagttttttccctatatttctgacagagtgcacgtaatttcaggaatgaatcttcccttggcaatgtcaatcgctttacaattaggaaatgataatttagatattgccgcaattattgcggaggcacaacaacaaatcatctatatgaataatcaaaaaagtgaagaaaagatagaggacgaataagatgaattatttaaacaatatatggctccacaagggagaggaaagtagaactatttcaccggaaaatagaaatggtgaaaaagggaaagcggcaatgacagcgagtcatctaggaatcggcagaaaagggtcaccttctgttccgataaatgctggagagacaattactttagcagaaatggaaggccctgggattttacgccatttttggatgacagtgacagacaaaacaaccgctgggagtttcgtcttacgtgatttagttttgcgtatttattgggatgatgaagcaactccttccgtagaaagtccattaggagattttttttgtaatgggtttgggacaagatgcgaagtgaattccttaccaatcgtagtgaatccaacatcagggatgaattgctattttgagatgccatttcgaaaaaaagctaagattactttaacaaatgaacatcctgagtttattaagcacattttttatacatttaattatgcattgactgaagtaccggatgatgcgatgtattttcatgctaaatggaaccgagaacctatcacgacaaaaggaaaagattacactcttattgatggaatcaaaggcactgggtattatgtaggaacctactttgctttgtgcgcattggaaagatactggtggggggaaggagagtttaagttttatatagatggagatgaagatttccctacaataacatctacaggagcagaagactattttggcggcgcttgggcttttcataaaaagaactttggagaaagggcatatgctcaaaattttaatacgctatttatgggctatccttttcaatctaaaagggatcacacccgggattattttagtgctggaaaacctaatcccaatccagttcatggttttggcgatgatgctttaccgatgcatgggttgtaccgctggcatttacccgaccccattagtttcaaagaaaatttacgtgttactttccaaactctaggaaatgatgacatcaaactttacgagcgtcaagacgatatttcttctgttgcctattggtaccaaaaggaaccacatgagtctttcgaaaaactattagacagggaagaacgaattcctagataaaaggacggtggggtaagaaatgtatggctcaatagaagcaggtgggactaaatttgtttgtgccattggcaatgatgatttaaaggttttagaaagagtgagttttcctacaactacaccggatgaaacaatgcgtttggtaattgatttctttaatcactataaagaacaattagaaagcatgggagtagggtcatttggaccgattgatatccatcgtgaatcaaagacctatggatatatcacctctactccaaagcctgcctggaaaaattttgattttgttggaacgttgaaaaaacatttcgaaattccaattgcctggacaaccgatgtgaatgctgcttgttacggggagtatgtttcaggtcatggaaaaggtttatccagtgttgtttattacacggttggaactggagttggtggaggagctatacaagatgggatttttgttgaagggtttagccatccagaaatggggcatacgttagttaagaggcattcaggagatactttctctggtgcttgtccttttcatcatgattgtctggaagggttggcatctgggcccgctatcgagatgcgtacgggaaccaagggacaagatctttctataaaagatccgttgtgggaaatcgaggcggattatattgcacaatgtgcctataatacgaccctgatgctttcaccagatattataatttttggtggtggtgtcatgcaacaagaacatctgaaaaagaaagtacaaagacgttttttagaactaattaacggctatgtcgatacgccaaatatcgaagaatacattgtcacacctaagttagcagataatgcaggaactataggatgcttaactttagcaaaagatgttagaatcaattcttaatcaaaaaagtattagtcaataaaacgattatgaagtccgatcaacttaatgtggccgggctatttgtattcagcaatatcattcacttacgatacgcggagccgtatcataaatgatgatattttttgattttccgcggtatgatgagattcatagattattgaatggataaaacaatcaaaaagaactcaattcccttaatcggcaattgagtttattttgtgtttggagaagtaaaaaatcaatattggatatgcaaaaaaatagctttatcacagagatagtggataaacaagtatcaaaagaaatctggtagttgaatgacgaaaaaagacgaaataagtagataccacctactgattcgctcggccataacctacatttgagatcacgctagatatttaacgaatgttttgacgtactttcttgggaaagtctattcttgatatctttgataataattcttcgctttttccatatgaagttgagaaataattttgtaaaagtgtgtttcagaagtgggcatactgcttagttgatcgagcaacgcatttattttttgtgaataggtgggaaaatcaaagtaaagatttacgatatatgtcataaagcgcagctgtaaggaaaaatatagattgtccgccttagtaataacacgttcataaagctgcagacaatctttagcctcgtctatatcattgatcatcaacaaccattgaatacgattgaaaaaaagatcgctgatttcttcataatatcgtttcgcttcaaaaatttcatattttgctaattcatcaagtagtctcgcgtaaaggctgcgttccttatccttctctttttcggaataggaaagaaggacaagtttcgccaattttatttcttttagtgtccacatttttattgtatccaaataagtaagaatctctaaaaagggagcacgagaaaaattgtaaaaattggtattcgtaataagcaccaataagtaggctttaatcgctagataacggatttctgtgtgagtgtgggatttgtatttttcaaaaatttcgtataaagcttcaaaattgccgctgttatacaattgatcaatctcagcatcgagtatcttctcttcatttataatctgactatccctaaaataatcgaattctgtttggctaattcctagattattcaaaaatccttgaaacttagttacttcaactgagtgttttccagcttcaaaatcgctgtaaaaagacttcgatgcgatacctgagtacacttccttttgtgtaagtcccttttgtttgcggattgatttaataattacttcgttcatgagttctcccaagtataattcctgtatacaggaattatacttgtttttagtttctttttgcatgctatattgtaaaaaacaaacagaggagttaataaaatgaacaaaacatattttaaattaatcggtggggcacttgctttaacaatggtaatcagtttcttctcagttatcggaattgcattgaaaatgaacgagaatggagttgttttatgtcagatagcagcatttctgatttgtggagtagttagtttcttttgtatgaagaaaaaagatccaaccttgaaacaattcgggttcaaaaaagggaagctaagtagaggaataataggatttatggcattgattatctgtatacagccagtcgttctaggaattaatttcaatctttctttttcaacattaggattgatcattattcagatgttgttagttggttttgttgaagaaactttttttcgcggaattattttcaattctttaagagataaagggccaaagttttttattattttttctagcatactttttggacttcttcatatggccagtagtttgaatccgaatactgccttcatcttagtcattttgcaaatcattaatgctttactgctgggattcgtattttcattcatttattattcaaatcaatcgatttacacagtcattttgtttcatgcgctattcaacgtatgtgcctcaatttctagtatttcttcaatcgagaaaaatattatcgcggtaattctattgagcattttctatcttttatttttgttccattaccgtatgatcagttcaaaaaagatttttagttagagctgtttatgtcgttggtctatttgaatccatgtaaaatctatcttgaaatatctctataaaagctttcgaaattagtttttaacaaggtataaatgcgtttatttagtagtcaagctggaacatacgctcatttattttacaggagttctaaccgattggatgaagtgaacgcacttgaaaagcattaaaagtttagccgattacaaatttaattgaaacataaggatgacaccaatttccgtacacatcctaactttgaagattacactagattaccccatcattcaatcttcgttgcatggctttaacacaatcagattcggaactgatgattccgtcctgaatcgtgcccattttttgttgcagggcaaggcaggtagcgggtccaaagttgccatctattgcaacttttaatgttgattgcagtgcacggatcatgttcgatccaccgtgtccaaattgaaccgagggaatagattgattcgcacgatttctgatttgtccgcttatgatcccatctttgatgctgcaattcaatacttcttgcagacgtctcgtagtggcaggtccccatgaaccatcgatggacaacattcgttgctgcccgatattttcgtgaggcccgctaacactcgtattttttagtcgaaaatagcgtacaggtaagccggaataatcacccatccagccgaacgctttggtcacggcgatattctgacagccttttgagtaggtacagtgcaatgcgttaccgttaatatcacctaagaaaaatccggtatgccccgctgaccccagcgatgcaccttgatgtccagcaatccagagatctccacggcgaacttgggagtggctgatttcttctaataaggtgccttttaagttgaagagcgtttcggtgtttccaatataggcgccgtttggcagaaagtctgccgcaatcaacgctcgaaaaacaaaactggagcaatccatggaacgtgggtccaatctatgtgacatggagtagcaaatttttccttgtagatttaatccgtattgcaatgcagtttcagtagttggcatttgattcacccctattgaatattattttcctgatcgtccttatcaggcgttttcccaacatcgcgctcgaacactctcagccatttctgcagccaagtgatcttcagtccgaattcatgggcattttctaaaatcgaaccgatctcgtaaatgattaataatgctgtccagattaaggccacattaattggcaaaatgattcctacagttggcgcgattttgtctaaggcagcggcgcaaataattgttgaaaaggtaatgaatttcgtaaacaagccatatagattaatcgaagacacccaggtatgacttttcaacgctttgacgtatccggtggtgaggtcgagtccaaccatggtcaaaaaaacgcccatgatcggcagacttccgccgaatagataattgattaagggaatttgtatcatatagattcctcgctttctaaattaattgatagcccctgcgaatttcttttcgcaggggctaatagctgttgatccctacgcagtatgtgattgtcaatgaacggatttaattgggaaaagagttactcccgcggtgtatcaggcggtccatctttgtttttcttcctgatccggtgaagccattgaaacagtctgttttgatcttttgtgtcttggcttggtgactcgtttttcattaaaggcatagcgactggctgctgttcgttaagctggttattgcttgattgtggaagcgactctttttctactttgatcgctgctttttctgaagtttcaatcgtgcttaattgtttaaaatagcgactatgggatgtagctggtagtacagatggttttggagccgtcactgtcgcagacttctccggtttttccacgacttcaaagcaacgtacttcctcacaggtagcttcctcaataggttctccatcgtaacgaacacctctcgtctcatgttctggatcaaatatcagggtttccttatgggtcaaaattttagcggtgaccacagtatcaaatagttttacgccgttttgtgtacaaatgtctaggttcgtcaatagttcgcaagcttctttgatctgtggcgccgttaaattgggattgaggcccttgtatttccaattgtgggtgccaccatcactttttccaaaggtggcaattaaatccttggtcattgttcatttcctttctttgattttttctgcgtagattggtttatgatttcatcaaggttcgctagtttcttcaggtcggacaaatgaaataagggagcgggcaacagagacgactgtttcaccgaatttttttactggaaaaactctcagtttcaaagtcttccattcgggtgccataaagtagtcttcaaaataataaaagagacgttttatggtacgtgtggctttagtatgcatgaacacttcgcggacaagatcctttagaaagtgttcaaactccgccgctcctaattggcagcgaacttttaaggctaaaatgtatttgatggtgacactactgttttgtgtttcatgataaaaattggtgattcgttgttcgagtgttttagcttttaagttgaataactgccgaaacgacagtgtttgtatgacattcattgatgctcatcctttcgttaattagtggaggagggcggcgatagcaccgctgctcctcaaagtattggtttaaaaaataattgtttcaattgtttcgacatatttggcggtttctacggtgtggaataattcagcgccatctttatgacaaagcttcacgcccgtcatgcgttgtaacaatcctttgatctctgtgtcggtcttttgagtatcaggatcattgaagttccaggtatgattttttcctaagctgtttttaaaggttgcgacgatttttaacatctttcatgttcctttctatggtttatttggtatagcgtgattgactggttaggatcacgccgtctaattcactgccttcgactgacaaggctttcattatttctcccagttcaagtaccttctcttcgctgggctcatccattacatttgtaaaggtgatcttcttagttttctctccgcctgcatcgatttctacttgtagtttattgccgattttttgaatcatggttgtttcctcctaaatttttttgtttccggccggtgactaaaagataaacgatttctaaaaaaagtgcgaatcgcaaattgaccaaaagggggtcaatttgacctgtttttgagtaaaaagtgctgtttttgatgaaaaagcggtcaaattgggggtgaaatggtcaatttgcgattttacaagtggtatcgtaatgtagtataataaaaattctgcataaaacgcttacattggttgctataaccaattatcctcataatcctcgtcagactccgcgatcaggtcgggaaaatgatatagtgcataactaatttcgtactgcttttttagcttgcctatgggggtgatgaattcttgcaggagaggtcgtttgcttaagtaacgagcgaatggtgtattcggcaggtctaggaaatcaagaggtgttgtgccagggcgagtagtatggaagcttccacgtgagatagtagctagaagtaaggaggcgatttcggcatgtttcgtgactcgtcgtttactgataggaagcagcaggatcagcccgtttatcatttcgacaaagtattgaccgtcatgtttaaagatagtgagaatctttagtggattgagccagatggtttgatctgcactttcaagaggaaagagtgcgaaatttggacagaaccacgggattttgtactgcccgaaatacttgagccgtttaagactatcggaaatgatggcataatcggggtagcaatgtgcagaagcaaaggaatgtaatgtcgtgagaatacttttattgttaataaatgtaccattatccgtaacaattaagatctcagtagtgtcaggtatcggagtgatgcacaggatctcttgaacctttgaggggacaaataacaacgtatcgtgcagatactcttcccattgtggtgaccattgcttatcatctaaaaaatcaaacgactctaactttttcataaatagttcctcctcttgatacaatttttttgtaaatgcgtaattacgtctctacaagcaaaagtataaaactagaggaaaaaagaggatataggaatagttatttaaactaattttttgtaaaaattgtccagtttttgtgacaaaatgagcaaatttttgtttactaaaagaaaatcgaataaaaatgcgtataggatcacgaggtattttttcatttcctaagtatgctaacttcaataaaattaaagagtatcagagtattaaaataactatttaaaaaaggtgaatctatctttcatactttccttgtatctttgctggaaagactgccatcatctaagcgataacagatgtttagaaaatggttaacaatatgtaggctaagaatatgtaggctaagaatttaactatcgttcattatccacaaaaaatttgaagcagaagcaattgctaagacaccccttagtaattgcttctgcttctttactgttattcagaataatcaaacgtatcctgcagcgtgccgtcttgtttttgtttatagactttcaccgaagaatttttgtttttcgcaatttccttcgctcgttcgacggcctgctcctttttgtcgaaggtgtcactggcttgactggctttttcggaaatgacgatccaatgatcttcttgatatttgactaaaacgtcggcattcatcaatttttttgcatttttatcatggtcgtgagaatcatttttttgtggtgctttggctttttgaaaatctttcttctctgcggcagaagcattgtcataccatttttctgcttgactggtggcaatcggaattgcacgatcatctggataaccatcatctagcagagcattcgcgatatcaatggctttttttcgaatcaatgggtctaggtttttcattgaggctgggtaatcattcatattccaaggcatacatacgtcctccttcaataatttatatatctaccttactatggaaacgattgatttgaaattaatacgcttatagaaaaaaatacacgcccgattatggacgtgtaggttcaatctttccgaattttcgaaatgtgtttgctgcgtccgccaattttagtagcaaaatggtcggattcttgtttgctttggaatacccaaagtttctcagggtctttttcacgggtgcgctgaccttctttatcaatataaccatggaggactttgacaacatacataagatcacctgctttttttagtttagctattagtatacggagtgaaaaaacgaaagcaaatcatttgcctgcggattaagagaaatttatacttgggcttttttattgcttgattgagatagtcttctaagatgtatcggtgacggtaaagcccagtaaaaatggctttgaaacaactagatttagctttttcagaagtttccgtttttttcagttggaatgcccgtatcctattctcttcttgctaagcttattaatgatactagaatgtcctcttactctagtattagataatcagtcaacgaagagtccaatctgatagatggactcttcgtaaagttacagatgtgtgacgatagagctgattaaatgtaatttcctaagtaaggtgaagagggtaatgtattgaaatcgtacttctcgatctcggctacgtgtttggtgaaagcatggagagattcagtcaacatgatattgaccgtatcgccggcagtcagcagaccgataacagggattttcagcatcgttgcgattccgatttcataagcggttcctgggtcggtaatttcgtgttcataatctaaaatagcgacgatagcatcggctgtttcaatatgatgcatatccttaaaataggtctcgcttgcccattccggtgtgaaggcttcgtactcgcatgtttggtctaaacgtggagaatgaaattcggtaacagttgggttgttcttcaaggctttttccactgagtgaattagagaaatttgttccttagagaaaaatggccctgctaaataaattttcattaggcaacaactcccatctcagataattcgatacagactttattgatcaatgattggtaatcgtctgagatcaatatgtgtttgattgcttgatagtcaatgaaatcttcatttgaagccttaatcagaaattcgatcaaggactgatagtagccgtcaatatcaaggatagcgataggttttggcggaacaagtccaatggcgattgagctcagtaaatgaaataattcttccagtgtttctagtcctccaggtaagatcaaataggcatctgatttattgatcagaagttgttttttctcatccattgtttcagtaaaaataaattcattgatctctttacgagaaagatcatcatcaaagaatccacgagagcaaattccggtcacattcccgtgcttattgataacaccattgcttactgctcccattaaaccgctgattgagccgccagaaactaagtccaatcctttatcagcgatatactcgccaatacgttctgcaagttctttatattttgcttcttttccatagcatacgccacaaaaaactgctaatttcataaatattaccaccaatctttttctttgagagttcatcatagctctaaaaaaaataaaataaaagactagatgttgtgttagatttatgttattggctaaaatacatacaatatattgtgttttagttaaggcgcgtacttgcttaatataaaattttttaactgatttattaatacatgcaggttattatttttagttttctgctgtggtggtgaagggaacagctttacggtcaatatgaatgatgcgtctgtctaacgaccaaaaatcggcaaaaaaaagacaatcaatggtgaactgatatgctccccctatataggacactgaaatataaagtggcttatatagggggagtttgtatgtctagaggaaaaatgaaattaagttcagaagaacggctagctcttgcagaaagagctttaagaaatgaagctagcataagcagcctggccaaagaagcacaagtcgatagcagtacgatagaaaggtggatcactctttatgagaatgagggacccacaggtttactccctacaaaaaggaatcaatcatactcaacagaattgaaactgaatgcggtccatgattatttagctggaacatatggtagcttaagagctgtcgccaagaaatacgggcttcgtaacaaaaaacaattagaagactggttaaagatatataatactcatagaaacttcaaatcagaaagtggtggaagtagaatgagtaaatccagaaaaacaacattgaatgaacgagttaaaattgtgcatgactgtattatcaacggtcgagactatgggaaaactgcgattcagtaccacgtctcttaccaacaagttcggaactgggtgttgaaatacgatgagatgggggaaaaaggcttagaagatcgacgagggcaacgagcgggaagtaaacctgccagaacacccgaagaagaaatgcgcgataaactggctcaacaagaacgacggatcaagttgcttgaaatggaaaatgacctgttaaaaaaagtcagcgagttagaaaggaggcgggatttgaattagttcgtcatacgtttgaataccaatcgatcaaagagctgcacgagacaaaaggctatccaattaacaccatgtgtaccctgctccatgtcacaagatcggcctattatcgttggttaaaaaatcccaaactgcctgaagtggtatttaatgaacagttggctgaccttgttcgttatatttatgaagcagacaacgataaaggatatcgcagaatctgtgaagatctcgtgaatgattatggctttcaagtgaatgacaagcgtattcttcgaatctgtcgcaaacttcaaatccaatcaaccatcaagcattcaggcaatagtatcactaaggcatccaagactccgtatcatattgcgaaaaatcatttgaatcgaaagttctatgcggatcaaccaaatcaaaaatggctaacagatgtgagtgaattcaagtattatgaaggggccgaagtgaagaaaatctatttgagcgctattcttgatctcgccgatcgtcgcattgtttcatttgtcatcagcgacaaaaatgacaataaattagtccttgataccttcgatcaagcagtcgccgccgaaccaaccgctcacccgctatttcatagcgatcgcggatttcaatatacaagtaaagttttttgcacaaagctaaagaaagcaaaaatgaagcagagtatgtctcgtgtcgcccattgtaccgataatggtccaatggaaggcttctggggaatgcttaaacgagaaaaatattatcggcgaaagtttatcagtagagaaagtctcgttgaaatgatcaaaaaatacatgaactattacaacaatggtcgctatcaacggtgtttgaagagtaagacaccgagccaagttcatcaagaattattaatggcagcttaatcactctccctcttggacaagcgaatagaataaatccgcttattcaagaaggagaccagtcgagcaaagttgaggttaaacaaagtaaaaaacataaaaactgcctaccgaaattcggtagacagtcgtcaaaataattttattctatttcattgtccacttgacggggagcccagcaaacactactgattgtcttttttaggttattttttttgaaaaatctgatttatagcattcattttctccagggcgggtctaatttttctgcgagagattaaacaggaatgattttgatcaaaataaattacaccttctgatcgatcaatctgtgcaatattttctaagttgacgacgaaagagcggtggaccttaaagaaacgttcatccaaactttcgatttcaccaagtgtcgcataaaaattgactaaacgagatttgcaaataagccgcagtttatgagaaatctcagttgtttcaaaataaagaatgtcagagaaggggacttggaaattgctgtgctgattgctaaaaaagaacgtttcttcttttttttcactagctcggttatttaaaaggttctcaaaacagtcaactaaatgctgtttgatagtatcaatgggactgtctttagcaataaaatcaaaagcagaaaccttataagcataagtaattggcgcaaattctgaatgagtggtaataaagacgatcactccataagggtccatagtccgaatctgactagcgatttctaacccctttttcttttctccattgatttctatatcgagaaagtagatgttttgatcaacggtttcttgaactttttttagtagagtttctggtcttgcagtggtaacgattgatttcgctggccaacgtttttctaaaaggatttcgcgaatgactagctctaaacgttgctgatgcatgatatcgtcctctaataaaaaaatgttcatcgtgggatttcctccttgatcatcaaaatttgtcgaaatacaccatcctgatattctgtctgcaatgaaagatttgtatagttttgaagaattgtttggatcgtggctaaacccagaccacgatttttccctttagttgaaaaatctttatcgaagatttttacgatatcaattggttcatcagaacaggaattttcaatagtaagttgtatctctttttcctttttatttttcaaaaagacaatcgttacaaaaggattttcagcgtcctcagcagcttcaatcgcattatctaataaaatggaagtgatgcgcacataatctaaaacctcaattggctcatcttgaataatatcctcaatttctaaatggacagggatatttttctgccacgcttgaataatgtgggtggaaaatatcccttttatcggtagagtcttcagattattcaattttcctagggcataatgctcatcctctaaaacgattccttccgtttccaatatccgggcatacgtatcttcaatcacagacaaatcctttgttttgatactctgattcaagctgatcagcacattatgataatcgtgacgaaaacttctaagctcactatacattgcttcgatttgctgaacataagaggtcaaatcagccaactgattgtcttttagttgttggatgcgctgcttgtccagctgacgagttttgatgttcaaatagattaccaataggacgatgactaggatgaatatagcgatcagatattttcgaattgggttttcgtcttttatcaaatatcgttctatccaataattgccaaattggatgatacaacatagtgtcagtaagatatttataaacagaagaaaaaattggttccaattgtctttatacttctctaaaaagtaaacacttggcctgattaagcgcaataaaattaaattacatatcattgaaaaaatgggtgatatcgtcatatttatcagatacatatattgggtaaaggtgtcttctccaataaaaaagagaatggtagcattcatagaataggcgaatacagcataagagaaggtagagtaaatactgtaaaaccatatcatattgttgctagaatctcttttaataatttttccgataataagaaagtaagaaatcggtacgacgaatacccagtagttcaaaagtaagtatcctataaaagatattaaaggaagagaaatagccattttgaacgaaaccttttttcttattaatttagaatagataaatagttgacaaatattttctataaaagttaataagaaaagtatcaaaacttccattttattctttggtagtcatctttttcaattttggattttcaggttcatagccgaaaataatgcagggataagtcagcaatgcaattgaagccgcaacaagaattttagaaatgtttttaagaaattgattacggttgtacttgatagttttcataatttttatagctccttttatttaatttataaaacagtggatgaatcatgatgatttccacaaataacccggtgatcattaatgttcctatttcgttatttacaaaaaatacagctatgaagatagctaacaaagcacttaagaaagaaaatatacgtttccttttacgttcacttacgctaaccaagggatttttttcagtatccgctggggcgtataataagacgcagcataggatcacgagggaaagaatcgtcatccaaaagaaagataagctaaaatccattttttgaagtataaatggaatgccaacaaatgttgtgataccaaaaatagagcaattaatggttgacttcgcgtgccaacccccagcatgccaccttaaaagaacgtagggcaggttcatgataaatgtttcaaatagaacccctaaaagataagcgattacataaacctggacagttttgaagatattaatcaaaaaaatttccagagaataggcgacattttcatattcatcttctgtcatatacttctttgcttggatcttatttaataagaaaaacgtgaaggtatgtgtcattgtctcacctcttttgagtaactttgtgttacttttcgattgtaaagtatttgcttaatgactacaacgaaaaaacgtgaataggctaaattacttctacatgatcaattatacttcttgttcggctaataaaaaatctttaagagagtcttttaatggagcatattttcttctggaaaagggacaactattgttagaatgatcttctaaaaagtaaatgtttcgatcgtatttgttaatctctcggatcatatacaggttaacgataaaggagcgatgacaacgaaatagccagctttgacttgtatcttcgaagtcgtttaagtcgcctgaagcataatgcttctcttctttagtaacaaagcataacgtatggtttttcgcaggatctatagtgatatatagcaattcagtcgcttggataacaactggccctttttttgtttctaaaaaaatcgacgtccgcatttttttctcccctttttaagaataataatagtgagttgaagatgatttgttaagacttataccgcgaatggttcaatttcaatcgtatacggtatgttttgagtttttaatggtttgttgtttcaaattctatgcaagaaaattgaaggacgaaatggctggtgttagtgagagcatgatctaagcaaacagagcagtgggaaaatattcaaaagatgaaaaaagtgatgaatcgcggaagcagagatcatgtcaaaatatgattgggaatttttgacatgtagctgtgcttagcgaaaaatatttgatctcttggtattcaagaacacttagggcatgatagtattcaaattacgaaggaagataagatcgtctgctatgtctgataagcaaactgttgaagcattagtcaaaccaatttcaatagaggctattaatgtaggaaagtagagaacttgaatattgataagtacaaccttttttaaaaggatgctcaggaatcactatgaggaggaactatcatgaagaaaacatttgtcttggctccagactcttttaaagaaagtatgactgcaaaaaaggcctgtgacgcgatggaacgaggaattcgcaatgtgtttcccgaggccgaagtcattcaggttccaatggcagatggaggagaagggacggttgatgcgttagttgacagcagcaagggcgcaagaatcgaagtgaccgtttctggtccgctgccgccggaaaaagttttgacctattatggcctattgggtgataaaaaaacagctgtaatagaaatggctaaagctaacggtatcgaacaattggcaaaagaaaaaagaaatcctttgcttacatcaacttatggtaccggagaaatgatcaaagcagcgttggatcaaggcgttgagaaaattattatcggtatcggcggcagcgcgacaaatgatggcggtgcaggaatggcacaggcgttgggcgctcgtttcttagatgaagacaaccatgaattaccgctgggcggcgcagcattgaaggcattagctaagatcgatacaactaagcttgatcctaggcttaaggatacggagatcattattgccagcgacgtgatcaatccattgataggtccaaagggggcttcggttgttttcggtccgcaaaagggcgccacaccattgatggtggaagagttggatcaggcgctggctcactatgcgacggtaattgaaagagatttagagataaagataaaagaacaacctggtgctggagccgctggtggattaggcgcaggacttttagtttttacaggagcgaagatgcattctggcattgatttagtcattgaattgactgacctagaggaaaagattgcacatgctgattacgtgtttaccggtgagggcggaatggattttcaaacaaaatttggcaagactccctatggcgtggcaaaaatcgcgaagaaatacaataaaccagtttttgcttgtgctggttttatcggcgagcaagtcgatgtgctgtataaggaagggttcacggcgatttttggcattttagctaaagctggctcactggaagaggctttggctttaggcgaaataaatctggaacgaacggttgaaaatatcgttcgtgtgcttagtgtacgatgaaggctcttctgataggtaataaatgaataatgattgtaggaaaaggcgttctaaaaagaatgccttttttgtgtctcatgtaaatggaaatagactcagtattaaattcttttcgattgataaaattgaaaatttatcttaaggaaggcggtagctttttattacgaagaaggacttttctgctatttctttttaatatactgtattttattgataaaaaaatttatttttctttttaattgtatcgtaacttttacggtaaattaataattgtagttattatataacggtataaatttctatataaataacatttgatttaaaattaactataaactataataattttattgatatattcttattttttataattatttaattttttgaatccttatatttagaaagaattatgcttgaacaaaaattcaatgaagagaaggcgataataatgcaattattagttttaaccaaagttcctttatatgaagaaaatttcgagaatcaattgaaacaactaggaaatgaggtttactgctcgagcaagctgcttgaaatgattaggatagaaacgtttaataaacaatttttaacacaatttgaagggattattttcagtgaaacattgtttgaaaaagaaattgaggatttgataaaggagttgcctaacggccgatttaaactttttcgtcgtgtgattgatgttgattgtgatgaaagagtgaagtccaattatgatgccttgattcctttgaattcaaatttggagaatcttagagatactttacagattgtggaaatatcccgcttggcaattcaaaagaaagaacaggatcagcaacttagtgtcaaacaaaaattatctgatttgaccttaaagttgaagcaaaaagagatcgtctactatttaattcaagcgggtgatcgtatcgtctccagggaggagcttagtcgtcagatttgggggaaagaaccgaatgcttcagttttggcaagcctgtcaaaagttgtctctaaagtaaatgaaaaactagagaatgaatttggtcacgtagcgattcaaacactatggggaaaaggctatcgattaaataaagagttttttgatcattttgaaaatgatctcggtataaagcaagaaataatggtcatacagtagggtttaagtaagttaccagggaggaggtgacgcttaacggggaatgaagcaaaagagtgataaaaaaggagcgagaaggaaagggagtgcaagaaaatgaagacaaggattggtaagattcttgggaaaatgactcgaattacggcggctatttttatggttgtgtcgtcatttgggttcaatggtttatcgctgattgtcgaggcaaagaccgcaggaggcaatactggatatggacaaaatgcctacgggtatatgtttgaaggaggtgcaggagatgttcggacgatttcctatgcgactggtggaaatgagccgatgggaaacaaatttatgttttgtacggaatctggtaaatatgtaagcccatcatctaattttacaaatgctactaagtcagtggattcatcgaacgcggcagcaattggtgcattcatgtatcacgtattggttgcaacaccacctgctaatcatacaaatcatgcggcgatgtcttactttgtacacacacaattggagacatctacaacaactcgagatcaatttctatcaagattcaattattggttaaatagaggagatgcagaagctgtcgcagcaaaaaatcagcatgataatgtgagagcaactgcgggagattattatggaccatataccttatctcttaatttgactgaagttgctggtcaaaagaaagcgaatatgaatttatcgcttaaatcagcggctggtaaggatatgaagaatcttaacttgaacggtctgtttggcggaaagttagagatgagcatgacgggtggacaattcgttcataagacaagtggaacgagcacaggaacgatctcattaaatagtatcgctgaattagataactatacagcgaatcaaggtccagctggaaatccattgagtattacggcgaaagtgactaagttgccaggaaatcaaatgcagcgttatgcatggtcaaacagtcaaaatatgatcactgcttatacggctaatggcttaaacaaggaagctaaagcgagtattgaatttaaaaaagatcaagaaaaatttgcaccgattggtacgactgtctcgaaacaaaatgtacaaatcggagaacagttgtcagatcaagtaacgatcagtgtcgaaggcggcaaggcatggccaacgatcgttgatacccaaacaccagtaccggcttcatttgaaatcgaatggtattactcggcaaaagattacggcaatcaaaaactagatgtgaataatttgccagcggatgtaacaaagcttccccataccgacacatttacagttaatgctcctggggttaaggatgttccttctgctaatgtagcagataagcaaggcttctattatccggtcttaaaactagataaaaacaagcaaaatacaccagatgcatttgaaaaaggcttccaagcgaaattcaatgaagaaaatgaaaaaacgaaagtcattgaaaaatttgcagtacaaggaaccactgtttccaaggttaagattaaagaaggcgacaatttagaagataaagtaagtatttctttagcggaaggtaattggccgaatattatcggcacgaatgataaggtgccagtgaaattccaaattgattggtactattcattaactgattatggtacgcaaaaacttgacgtgaatagcttgccaggcgatgtttcttatatcggaagcgatacaaaaacagtgaccgcagcaggtgattacacagtcacgtctcagcataaatcgacaggaccaggtttttattatccggttctaaaagttgttgtggcggatcaagccaaccaagaacatttttctaaagggttccaagcaccatttaacgatgataatgaaaaaacgatcactccgtggaagcctgaagtgaaaaccgaaacaaccgtggcgcaattatcaccaaaaggtggaaaggtcgccgataaattgactgtttccggaaacaaggatagtcatgaattggtcgttaagagtactttatatggcccttatctaacgaagccagacttcattcaaagtccaaatcaacacgatggcggcagtacgacagtaccagctggttcaaaagtcgcggggactgtttcaacaacaatcaatgggaatggcacatttactacacctgagattgaggtcactgaaaaaggctggtatgtctgggttgaagaaattgagtctactacctacacagaagagtggcattcaaattttggtagcgcggatgaatacgtcgtggttccatgggagccaaatgttgaaacaactgtttctgatgcctctggtaccgtgggcgctcaaatctatgacgcgatcaaagtgttggatcttcctgggatgtggggattaccaatcgacggtaaaggcgacacagataaatggggcaataaaaatcctgagctgattgggaaggatcgcgatccagataaaaatggcgattacaatctacccgatggttggggaaccggcgcagattcgaaagaagatctgactgcgaccttcacgatgtactatagcccgacaaaaccaatccgcgatgatcaaatccctgctggggcagaagtttttgatgtcgtaaaagcaccattgatttctggtgaattacgtacaactgaattcaaagccttcgacaaggccggttggtatacgatcgttgtaactggcggatcagactctggacgtctagcgaagttccaaaccgactatggtattccgtctgaaacagtccatgtgccatctggcagtgaagaagaattttacacacaagtaaatgaagagaatgtcttctcgaacattcctgtctatgatagtttgcatgtcaataaagcattgtctagtgatgatgcagaagtcacttttacactgtacaaatacagtgacaaagccaatgatttcgattattcaaatcctaaagaaatcacaaaatcgtctaaagggatgccgattaagaaatatggtgaatacaaatcaaatgcgaaaggttacggcttagaagatgttcgcatcacggatcaaggaacgtatggctgggtagctaaggttgttgatacaaaaaccaataaagtgatctatgaaggaaaacatggtgacccgggtgaagtctttaatgttcacaaggtaaatatccatacaaaagcctcaagcaatgatacctatttaggcgaatcaatttatgatactgtcatccttgaaacaaccgtacctgatgggtattacgtcattgttgacctgtataaattctctgataaagtcaatgatttcgcgaatgctgataaggcaaccgataaagatatcgtttggacttctgaaaagatcaaggtcagcgcctcaggtgagtacaagacaggaacgtttacaccaaaagaagtcggttcttacggatatgttgaaaagctttatgacgacaaaggcaacttagttcacacaggtaaaaaaggtgaagaaacagaaaatgtgattgtccgtcctaaaattgaaatcggaacaagtgcaaaagacaaagattcagatattaatgaaggaaatgcggtagatgaaaatagtcaaccgaaagacgaaatcacaatcatcgataccgtttcttacaaagatttagttatcggtcgtgagtacacagtcaaaggtgtgctgatggataaatcaacgggacaggcttttgttgattccgatggcaagaaagtgaccgctgaagaaacattcaaagccgaaaaagaaaacggcacaatcgaattagcctttgtcgtgaagaaaacagatatgcgcggaaaaactgtcgtggtctatgaaaaactctacgaaggtgagaaagaagtcgccgtccacgaagacatcactgatgaagatcaaacagtcaattatcctgaattagaaaccaacgctaaagatggcgatacaggtacaaatgaaggaaatgcggcagatgaagtaacgattgttgataaagtaacttataagaatttgattatcggtcgtgaatatacggttaaagggaccttgatggataaggaaacaggcttaccattcttaaccaaggacggcaacgaagttcatgcggagaagaaattcactgcagaaaaagcaaatggtagtattgaactgacatttaccatcactaaaggtgatcttgtaggaaagacaattgttgtctttgaaaaactgtataacaaagacaaagaagtaggctcccatactgacatagaagacgatgaccaaaccgtttactatcctaatgtcggtacgaaagccgctgagtcaagtatacacggagataaggtagttatcgaggatattgtttcctatgagaacttgattcctggaaaacaatacaaagtcgaaggtatcttgatggacaaagagacggggaatgctttcttagtcgataagaaggaagtgactggttctgcaacctttaacgcctctgatacaggcaatggcacggtcaaagtgacgtttacctttgatcgaaaggcgttaaaagacaataaggaattagtggtgtttgaacgcgtgtatggttcgaccggtaagctggtcggcacccacgaagacattgatgacgaagaccagacggttgaaattaaaccagaggtcgaaatcaaaaccaccgcaaaagatgaagaaaccgagatgaatgaaggtcttgctaaagaagaagtgaaaatcatcgatacagtttcttataagaatttaaatattggacaagagtacactgtcaaaggtgtcttgatggataaagcaactggcaagccattcttgaccaaagacggcaaagaagttcatgcggaacgtgattttgttgcagagaaacaaaatggcaccattgagttaacgttcactgtgactaaaggcgatctagcgggtaaaacagtggttgtctttgaaacattgtatgtggaagataaagaagtaggcgctcatacagatatcaatgacaaagagcaatccgttaattatccagaagtcggaacaaaagcctctgaatctagcatccatggcgatactgttgtcttaaaagatattgtctcttacgataatcttgttcctggcaaggaatataaggtaactggtgtcttaatggataaagctactggtgaagccttcaaagttgatgacaaggaagtaaccggtgaagcaacctttactgcgaataaaaaagggactggtacagtagaagtcgaatttatctttgaccgcaaagccatagaagatccgaaaaacttagttgtcttcgaaaaactgtacaatgttgaaggcaaattggttggacttcacgaggatctcgaagataaagatcaaaccgtcgaagtcaaaccagaaatcgaagtgaaaacagatgccattgataaagacacagaaatggatgaaggattagcgaatgaacgagtaacgatcgtggaccgagtgtcttataaacatctaattgtcggcaagaattacaccgtcaaaggagtcttaatggataaagcaaccggcaaaccattcttgacgcgcgaaggtgatgaagtccatgctgagaaaacctttaaagcagagaaatctgatggtacgatcaatctagaattttatattaagcgaggcgacttagctggtaagacagtcgttgtcttcgaaaaactgtatcatgatgaaaaagaagtagctgtccatacagacattgaagatgaggctcaaacagtgacttatccaaaagttggcacgaaagcttctgaaacaactggatcgactgataaagaagtaatcatcaaggatatcgtttcctatgaaaacttagttcctggcaaggaatacacggtgactggtaccttgatggataaagccactggaaaagcttttaaagcgggagataaagaggtaacaggcaaagcaacctttatcgcttctgaatctggcagcggcactgtcgaagtagccttccagtttgatcgcagttaccttacggaagaaacggtactcgtggtctttgagaaactattcaatgttgaaggcaaactggctggattacatgaagaccttgaagatgaggatcagacggttcgtcaaccacaagtttcaacgaaagctaaagataaagaaacagggaccaatgaaggctttgcggatgaagaagtcacagtcgtcgatgaagtcaactacaagaatttgatcgtagggaaagaatacacggtcaaaggagtgttaatggacaaagagaccaataaaccgttcatcactcgtgatggtaacgaagttcatgctgagaagaccttcaccgcaatgaaacgtgatgggacgatcgaactggaattcaagattacgaagggcgatttagctggtaaaacagtggtagtcttcgagacgttgtatcaagaagataaagaagtagccgctcatacggatattgaagataacgatcaatcggttcactatccaaaagttggaacacaagcggctgaaatcagtcaagaaagtgacgaagacgtcgtaatcaaagatatcgtattttacgaaaatctgattccaggtgaaagttatactgttcgtggaaaattgatgatgaaggacgcaaatgcaccgttcacaatcatgggtcgtgaggtagaaagccaagcgacatttgtagctagtgacacaggtacaggtactgtcgagatgagctttactttccgtcgtagtctgttatcgaatgacctaacattagtggcgtttgaaaaactatttgatgcgaagggaaatttgatcggtgctcatgaagatatcaaggatgaagcgcaaacagtgacgattaagaagaccaatcctgagctgcctaagacaaaaggcgacacctttagtaatggtagtatcggtacatcctatgacgggggcagttatgattctggaggcagtctgccgcaaactggcgaacaagtgttgaagattctaccttatatcggactcgtaattgttgttctggcaggcgcgttgtatttctatcggaaaagacagatttaattattatatagaagatttctgtttagagattcctatttcacaaacaaaaaaatgtaaaaaaggaaaaaaccgtaaacttgggccatagctcaagtttacggttttttaggctgcagtcgataaatcgagatttttttcattaaaggtatcgccatgatctaaatcaccatatttatacccgcgtttgaaccagttgatgcgctgctcactagttccgtgcgtaaagctgtcgggaacaacatagccctgatattctttttgcagggtatcgtcgccgatcgcattggctgcggtgatggcttcatcaatgtcgccttcttctaaaatcggttgaccttcataggtttctccggctagatatttcgaaaagcatccagctaaataatcggcctgaagctctaagcgaacactgtatttattgtactcagtttcagaaacgcgtttgcgaattttatctaattgagcggagatgcccagctcgttttgaacatggtgtcccacctcatgggcaatgacatacgccatagcataatcgcctgttgctccgtatttattagatagctcatccgcaaagctcagatctaagtaaacgttctgatctgccggacaataaaatggacctacttgcgagctggcttgtccgcaggccgaattgacactatcagtaaacaagacgagctttggattttgataggcttcattcagctcttcaaactccccattccaatagtcttctaaatgagcaaagacgacagcagcgaactctttttgctctgtatattcctttgaagaaacattttctgtttcataagttgctggtgtaattccaccgcctaatgtatcagtaacggtgcttaaatctccgcccgataaaaagaaaacgatcacagcaatcaaaaagacaccgatcccgccgccagttgctattttcccgactggtcgtccgccgcctgaccgatcctccacattcgaactttgccgatccccacgccaacgcataacatttcccccttttttctattaactatagtttagtcgaaaagcccatagaaccaaagaattaagcctagtgtttttaaatctagtacgttttcagatcagattaacggtgtttatttgataaatgagagagactgttagaaataatcattgattcttttagtttgagtttatttcactttttcgagtgtatatatacgattagcataaaacgaaagaatgacgatttagcttgatatctcgtttaacaggcggtataacaatgtttttatattcattcaataaattaaaaaatattattgaaatgtatttgtaacatttcttttatatgcatgatatatccctatggtagaattacttctgacgttatgcgatctaacattttaaatctacataatagccggaggaataattagtgaaaaagagtttattatcagcattgttggtatgcacaatcgcagtatcagcagtaccgaatattgcactagcagataattacgatcaacagatccaagaaaaagatcaaaagatcagtgaattacaaggaaaacaatctggtgttcaaacacaaattgacgaattaacaaacgaaattgcaacagttagcggaaaagtaaaagacttagaagcaaaacaagatcaattaaataaagatacaatgaaattacaagaaaaaatcgccattttaaaagtgcgtatcgcaaaacgtaacgaagtcattaaaaatcaagcacgtgatacccaagtaaagggacaagcttctagctatgtttctgctgttttagaggcagattcattatcagatgttattggtcgtgttcaagcgatgtcaaccatggtgaaggcgaaccattcattgatggaacaacaaaaagccgatgaaaaagcggttgaagcaaaagttaaagacaatgaaacaaaagtcgctgaaattcaaacaaaccaaaaagaattagaagcacaaaaaaatgaaattgcaaacaaacaagctgaattgaatgttgtaaaagcaaactacgctgcagaacaagcaacagctgaacaagataaatctaaattgaaaaaagaacaagaagcggcaaaagcagaacaagcacgcatcttgaaggaacaagaagaagcggcgaaagctcaaaaagctgaagaagcacgtcaagcgaaagaagcagcgaaagctcaaaaagcctttgaagaatctcaagcaaaagccgctgcagaacaagccaaagcaacagaagaaagttcaacagcatcttcaactgaagcttcatcaagtgccagtgaagaaagcgcaacgtcatcttctgcaacagttgaaaaaactgagcaatcaagtacagctaaaacaccagagccaacaccttctcctactgtaagcacaggcggtagcaaagtagatcacactggttcaggcaatgcttatgcagtaggtcaatgtacttggtatgttaaaaacgttgcaccttgggctggaacttattggggtaacggttgtcaatggggtgcctcagctgctgctgacggattccaagtagacggaacacctgccgctggttcgatcgttgtcttcgcacaaggtcaatcagttggaacatggaatgctgatccagcatacggacatgttgcctatgttcaatcatacaatgcgtcaaacaatactatcactattactcaaggcggcatgggcttcccatcaccaactgggccaaatactgcgacattaagcgcagccggtttacaatatattcatccataaggataatgtaaaagagtttccgatttcggaaactcttttttatatgctgtttataagtaaggtaaaaggctttgaaaaagcagcgcacttgaagcggctccaggatcaatatgaccaagtgagcgttcgcccaaatatgaagcgcgtccttttttcgcaaccatttctttggtattctcctttgccgattcaatcttatctttggttaaatcagcgtttttaaggtcttgaacgactacgttccaaacgtctaccattgttttatcaccaggttcagcttttcctcgcgcttgaatgccagtcaaacctgtgtttagcagttctcctaattgttcttggcttgtaatttctgtgatatccttcgttgttttggtcaaattcatgaaagctgagccgtataatgggcccgaggcgccgccgacttttgaaatcaaagccatagaaagaactttaaatgtatcgttgattgtcgttggttgtttcgcttcaaaagcaatcttatactcactcatcccccgattcatattgttcccatgatcgccatcgccgatcggtgtatctatctcacttaaatagtctttattttcttcgatcaactgaccaaaatctgatagccaatcctgaatttctgttacggttatgttcatgctcttactcctcatttgtgttagtatccttatttataagtctgattcttaagccatagacttaactttaagcaaatgctgcaacaattactttttagtagtcggcttgttaccaagagatggtagcgaccttagccttcaatgctttttgccaattcgcataagccaaatcaatgaaggttaatgacagtccctgcatgtcaatcgaagtcatataattgccgaccttatggaaggaaacgtgaatattttcttgtcctaatagagttaggacatcattgataaaaatgaactgctccatcagcggtgttccacccatgccattgactaaaaccccaatctcttttggtttttgatcataggcagtaatcaatttcccaaccatttcttttgcgaggtcttctgaggaacggattttttctcttcgatagcccggctcaccatggattcccacaccaaattcaatctcatcttccgcgagaacaaaaccgggtttaccaacttcgggaaccgtcgcagcttttaaggccacaccgatagttttcgtcgcagctaccacacgatcaccaagttcttttagttcaattaacgttgcgccatttctagcagcatccccaaggatcttatggactaaaatcgttccagccacaccacgtttacctgctgtgtaggtactgtcttcaacggcgatatcatcgtctaccactaccatttcgatcggaatatcgttcatttccgctaagtcttttgccatttcaaaattcaaaatatcgcctgtatagtttttgacaatcaagagtacgccttggccttggtttgcttcattgatcgctatttctatttggtcgggagttggtgaagtgaagacatctcctaaaacagccgcgctaagcatgccgttaccaacaaatccagcgtgagcaggttcatgaccgcttccgccgccagacacgagactgacttgcttcatcgcatcatttttcgcaacaacacgcgaatcgtcgactcgatgaaccagactgggatagcttttgacaatcccacttagcatttcttcaataatactttgtggagcattaataatttttttcatcttaattccagcctttcttaggagcattctgtgcttccgctaggatatgttcaaagtcatcagagacactagcggtaatgccagccgcaaaggcgccttcgactagtggtgcatcgaccaatacatatttggcttgctgagcttcctccaacatatcaaaagccaactccgcacttaaaaccgcgctgcccagatccgcaaagacgaaaaatttgtcgactgacggtgctccgttgactgcatcaacgattttagtcggatcactgcctaactcgccttcggaggtaccgcccaaagaaaaaatttgcagcgactcgctttgggccatttgttcgatcatttctttgatgccatcggtgattttttggctatgagagattaatagaattgctttgttcataaaaaggtgctccttcgtctagtaattggattattcaattacatgtgatgtttttctttgtaggcttgaccgatgcgatcggcaacgatgatggcattggcaacgtcttcttccacgatcgggaatggcattgaatgaatcgattcttcaggaattgacgcaatttttgcgactgctagagcttcttcaaaggtaatcgactctacaccaagatcggctaaagtgagcggtagaccgattgctgccatgaagtccatgacggcattgatttcagctgtttctgcatcttctaaaaccaattgtgccaaggtagcaaaggcgactttttcaccatgaaggtaatgatgcgtaccttcgagaacagtcatgccattatggatcgcatgagcagctgctaaaccgccgctttcaaagcctaagccggaaagtaaaatgttggtttcaacaatcttgttcagagattctgtaaccaagtcggcatcgcatgcgatttttgcattcaaaccatcttcttgcaggtgttcccagcaaagctttgccatagctaatgcagcataggtgccgctggcaggaggcgtaagtctttcacgggagcccattggcaagctagcatttacgcgagaataggaattgtgagtagcccgtgcttcaaagtaagtcgatagtgcgtctcccattccagcaacaagaaaacgagtaggggctttagctatgaccttcgtatccactaagacaacacttggactttgtttgaaatacgcataatcatcaaaagaaccgtcggcatgatagagaacggcagaatgtgaagtaggcgcatcttgagcggcaatcgtcggaacaataattaatcgttcgccttcagcgacgacttttgatgcatcaatcgctttgccgccacctaagccgatgatgcaatctgtttgtttttccttggcgatggcttttaaacgttgggtttcctcacgggttacttctccattgaatccgccttcaataaatgaaacattaaatttttctgctgtcgtgtctaattgtggacgaacacgtttgacatcatcaggattggcgattaataaggcgctcttgccaaatgttgaaacaaaataacctaagtttagtaattcgtcttctccttgaacgtattttgttggtaaaatcagtgcttttctcatgggtgaatcctccttggttttatttacaggctaatcataaagcgttatcatagaaaatacattgaactatgttaccgttttcttatataaatcaattgaactattttgcgaaatagaattattttgtgattttgctgaaacgttctataatgcatttgagagactaactatatagagtcaagtaaaaattagccaaatcaaaaaatattttataacagataattccgaaaaaagggtacaacaaataagcttcttaccattagtttttttgaatgttcaatagctaatcagaaacaattatataaggctcgtttttagtcaaaatagcatgaatcacgtaacaaagcttacgagaaaccgcacctaaggcagttagatgatgttttccttcggaaacttttttctggtaaaacgcactaaaaacaggatcacattgagaagctactaaagccgccgaaaacaaggcttttcgcaaatatggagaccctcgtttactcataacattatgcgttgcctcatattgccctgattgtgtcacggaagcgtctatcccagcgtaagcaacgagttttttcgggttagaaaatttttgaatatctccgatctcaccaagaatagtcgcaccgtttataggaccaattccaggaattgtgagaataacagaatttaaagtgtccattatgtgcttgatttctctttccgtttcctttatttggctttcaatgaattttaattgttcaatcattgaacgtagttggaaggtgaacgcttcttgagcaaattttactccaaaggagttagaagctgcttgcttcaattggtccgctttttctgccttgattcggttcctgcttaactcagctaagtattgggccaaagtttctgaggaaatgttttctaagtcgatcggggcactaaacgccagcaataactctttagaagcttttccgaaaacgccctgcttggtaaaaatcgtcgcgtattctggaaagacttgatccaatacggctataatttttcttttgaagtcgctcgctgtacctactaaataagttcggtaacgagaaagttgtttcaaagaaaaaacattttcatcggataagaccgtttcgacaaatgagccatagcgcattaagtcagcaatcaaaacagaatcaataatatcgttttttcgtttccgtatttctgtacctttacgccatccgtctgtttgaaggggattcacaacgtgaatcaaataatctgattcgtgaaggtatgaaaagatggacagccaatagtgccccgtggcttccatccctataacaaagtcactgggtgctccggaatagtcgaccattcgctcaattaatgactctgctccttcagtggtgttaggaaatgaaaaaccttttagtaatacctttccttcctcgttcatgatagaagcaacgtgagtgcgtttaccgatatcaatgcctaaaaagtacatgtatatctgacctttcaaaaaaagaattttggattgaaatccactcaactgaaaagcgtcactaccttgtacgagatacggagtaaagtaaggactttcaacatctaactcatacgcaatccacttatcagagagaggagccagtctctcgagtgcgggttcaatgacccaaggggggaacggcttagcctctcaatccaataaatatattatctcaaaagaaatgagttaataccaaattaaaataacgatggttcatagggttatccaatcaaaaccggaaggttaaaaccctaactctaatatacaaggtgagtatgtgagtgataagcaatttgatatcgaacaggtgttggatttaaataaatgggagtccgtgcaggagagcatcgcactagccacgcatttagcgattattttagtcgattaccgaggaaaaccgattactaagcacagccaagtaaagccattctgtcaattggttcgcagccatccggagctctctgttcattgtgaaaaatgtgattcgagaggcggattagaggcggttcggacaggacaaccctttatttatcggtgccacttcaatattgtcgatatggcgatcccgattatgattgacagtcggtatgtgggagcgatcatggcgggggagattttgctagaagagggtcaagaggagcttgagcaggtcttgcagctagaagatcaagcgtttttgaaaacgttcaaaaaagagcatcaggacttaatagctcagtatccaacgtttactaaagaggatttgcggaaatcagctgagatgctggaaaaaatcagcgagtatatcgtcagtgaagcaattaaaaaggattatttgatcaaggcttataagcaaacgctgcggctttcaaaaagagaggtttcaatcgaaaaaaatgcgctggatttggaaattgtccaaaacgatattcagcattcgaagctggagaatcgattacaggaatctaacggggtctatttagctaaaaatacggtgctgcagccggcgattgatctggtttttgagaacaaggaacgccatattgatttgggcacgctggcgactgtgacgaacgtttcgccaagtcatttaagccgtttattaaaagaggagttcgatgaaccctttagtaaaatatacggcaagcttaaggtttattgggcgcagcaattattagaaacaacagattggccaataggtgaaatcagtgatgctctcgggtatgtagagccaagttatttcgttcgcagctttaaaaaaatcactggaataacgcccttaaattatcgaaaagagaacttacgatctagcgaagaattagctggacgcttcaaagaaaaatagtcatcataggaaggactggataattttcctttatccagtcctttttaatgtgatccgtgaatcactattaaagttttggaatttcggtataatgaacaggtatgatttttttttacatagaaaggaccattgatagatgcttacaaagctttcaaattacataaaatccgatttaatcgaggctgaaataaatgcaggaaaggatcaagacaccctgcagcaattggtcgctcaaaatggcggtcatcccttcagtgaggatcagctggcagcgattcgttttccgatgcagacgcatctacggattattgccggtgctggcagcggcaagacccagacgatttgtgccaaagcagcttatttagtgctggaaaaatccgtcgatcccaagacaatcatgatgtgtaccttttctcgcaaggcgaagctggaaatggaagcgcgggtcaatcactatttgagcggctatgcccgtatcagcgttcaaacctttcatggctggttcaatgccgagtacaatgagttaatccgtcaatttcccgcagcgaagcagtggggaatcgcaggtacgatcgacgaagagcactattatcaaactgtcaatcaattgattaaaaaatatcgcttgtataatttcgataaattcgaagaacgtccgattgtttcccgaattagttattggcgtaatatggggtattccgatcaggagatggtggattttgtcgcgcagcattttgatcaggaggaacttctgctaaatcaaaagctgagtgtggtttttcaacaatttttagccgagctggagttgctgaaaaagaaggaacaatttattaattttgacgatatgctgtacaatctcaaactgattttggaaaacgatagggcagcgcgagcctttttgcaggaaaagtatcgctatatttttattgatgaatttcaagatatcaatccattgcagaaacaaatcgtggcgttgatttgtcctcctgataaaatcgctgaagagaaaaattcagggaaactgattatcgttggagacgacgatcaaagtatttattattttcggggtgcggaaccgagctatatcaaagcgtttgaacaagagtatcagcaaacgtccttgaaattaatgaccaattatcgttcggaggcaccgattgtagaagcggggaatcggctgatacaacacaatgcccatgatcgtttagaaaaaacgatgatcgcaagtaaaacgacaatggcacatgactgctatgccattggtttttctgatgatgaggaagagaccgcgtggattggaaggaaaatccaagaactggcgaaaaatacgccgctgagagatggcagtccagattatcgggagacgatggttttgtacccaactcgtgtgcaattacgttcattattgaagcaactgaaaaaacaaaaaattccttttgtgacgccaaccaatgatgatttgctgggaatcttcggtttgcccttgttcaagaccctttttcaacaattggacatgctggcagcagctacgacgattcagcaaaaaaatgaagcactaagaaaaattatccaacaatacgctttttatcatttcatcaaatttggcgccagcgctaagtttagcgaggaattattcaatcaaaataaattcaagattaatgatctcgtcgcttttttaatcagtgaacgtaagctgtcacaagcagctcaaaatcaagcgaagcaattctttaagcaaatctatttgttttatcaaggcaagcagttagagcttgcgccgttatcggctgcattactttcgacaccgaaattcaaaaaggagttgagtgaagaagaagcagactggctgaacaaagaattgacggcagctggtgattggccgggactcttggcggcttatcagcaggctagtgagcaaaatcaaggcatgaaaaaacgtctcaatgattacgatcaggataaattgaacgctgtttatctgctatcgatccacgctagtaaaggattaggtaagaaaaatattttcatcaaaggggtgtatcaagatgcgctgcccaaccatcatacggtcaaaaaggcagagtgtgatctgaagaaggctaaggaagaagctgctccgcctaccacaatggaagagcagcgccgtttgatgtatgttgccatcacacgcgcaaaggaaaatctctatgtgacctatcctaaaacggtcaataataaagcaacggaaccttcgccctttttaaaagaagcgggactaccgctcaaagaagaacaaaagaaatagtataatgaaggaaaacgggagggcttatggacaatttgagcatcgaagtaggcaatggcgttcatttacgagcggccagcagctatatccgtctgcaggtctttgttttagaaagatccttggcattatctgatgagtttgatcaaaaggatcaatcagatacgatttacagtgtgctttttgaggaggcccttccagtggtgacggcacgttttttacaagaggatgaacgcgttgcccggatcggtcgtgtagcaactttgaaggactatcgaggcaagcaattaggcagccgtgtcgtcaattcgctggaagctttggcaaaggaaaagcagattgaacgactgcttattcacgcggaattaacagcggccggattttatgaaggtttgggatattgtagcgcgggaaagccctacgatgaggatggcgtaccttgtattacattggaaaagcagctttagagtgattgagtgaaaggatggacaggtgatggatcatcaaaaacaagcaatgacttattttcaagcaggtcgtaactgttgccaagcggtcgtgggtgcctattgtacggagttggggattactgaagaaaaagcaaatgagcttgcggcaggtttcggcggcggcaattatcaggggttgtgcggtgcactagccgggacctatatagtagctaattatttgaagggttcaccggaattgaatgatccggctaaatgcaaagacgatgaggctggcagacggatggttgaaatgacccaagattttgaaggcgcgtgtggttcactctattgcataaagctgctgggaaaacgtccttgttctgactatgtctgtgcggcgataaaaattattgacgaaaatgtagcagagtaaaaataagcaagatcactcaacgaataaagctgagtgatcttttctaattcatccgacaaagtaaacgagtacaaaaagagtttgtcacctccaaaataatatgttacgattttcactatctagacgtagaatttgaaaagatggttggaggagtgttcataagatgagtgtttcaattattgaagaaatcaaaataaatcttgtgaattatctaatccgatggaaaaagcaaattgccagtgctctggcggttttgaccgtccttcttttgtttatcatcattcagcgagcaacgctgaataattctgcctggctgcagggaaattggacgaatcagtcagtcgactattcatttaaagcaaaaaataagggcttcactaaatgggccatcaagcgtaaaggcttattcgtattaaagcatgcgtgggtaacggtgaattctaataaaaaacgcattattttgactgatgatggaaacaccgtagagtatcaggtgaccaagctggatcgcaaccacctaaagctagaaataatgaaaaacggcaagtcaaagaatagcttaaagctgcaaaaagaatagatcaagaccaattattctgtgaagaggattggtcttttattattgcataaagcccaattgttttgctgaatgtttaatagttgctcataaccccccctcgtagtaaagtgaaaagaaagtgctatttaggaggtttcaagatgaagaacacggaattcgcgatggaaatgttagagcgtgctcaggaacgttttgaggatacctttgatcagatgaccatagaagaagccaatcagatgcccgctccgttgatcaagtcagtcgtttggctgatgtggcatacagcccgggaattggacatgcagatttctgatttaaacggtacagattttctttggacaagtgccggctggtcagaaaaatttgccttagatttgcccgacgatacaccggattatcgacatatgcctgaagaagcggcgaaagtcgttgtgaatgatcgacaattggtactagattatctagcagctagtatcgaattcactaaagagtatttgaggcagctagatgagagcagcctagatgatgtgatcgatacgaattgggacccgccggtaactcggcaagtacggatcgtttcggcaatcgatgacgcagtgatgcattcaggtcaagcggtttataccagacggatggttattgggaaatagtttttttgagaacaggtctttcctgagggagatctgtttttttgtattcagaaatttgtatcaagctaaacaattcattttttttacagtagataataataatcaatatatcaaaattttcatttttattgtttgaagagttcgcgattgttacaatccttaaagcgcgtatatcaataaacagatacgttttgcacagtgaagtggaaaaagttcaacttttctatttgaaaggggtttcctatactaaacgtgtaaatgattgcgcttgcaaaaaaggagaggtgaggatgagagaggtacaaatactaactgcattgaaagagcatggttacttgaaaattgatcagttagcaaaaatgattggtgtttcctcccgaacaatccgcaatgatctgcaagagttatcggatttacaacagggctttacgattgaaaaatccgctaagctggggtgtcgattgattatttcagatgatacgcttttttctaaatatttagccggattttctgagacaaccattgaaatgcaaaaggatcgaattgagtctttattaagtttgctgttgattgatgaaaattatcaaacagtcaaacaattaagtgatgagctgctagtcagtggaagtcagataaaaaaggatctttccaagcttgaattatatctaaagggcagttcattagtgctggagcgcaaggcacactatggaattcgcatcatcagtgaggtgaaaaatcgactcttattgttattggattgctatcaaagaggaaacaataaattgctggagaaattggagaaagcctacgatcttgaaaaacaaaagcaaataaaagatcagctctatcagttaatcaacagccatgaatgggaaatcgattatggtgagtttcggcgattggaagaggaattacttttgcttcttctgatcaagtggcaaaaaacgcaagctgaagcaccagtctcctatttaacggaggtgctacagaagacatctttctctgttccgattcaaaaagaggttcacgaattttttgaagctagtctactagcgaagactaaaaagttggaaattctaagcaacaaacaattgttgaaggaagagattatccacttctttcagcaaatggatgcgcaacagaagacttggttttccactgatcaggaatttcttgatttggtttatctccatgtagctgccttgatcgagcgttctcgcaaagaaatgaacttcagcaacccttatttggaagacattagcaaggattatccggtgatgtttaattatgcagtgatgttctcaaaatggctggaggaaagattccagttaacaatcgcttcagatgagatcggctatctggcgacgcatatgacggttccttatcataagtggcagcagcatctgattgaaaatatttatcgaattgccgtggtttgttcttctggcggcggcatggcttatctggttgaaatgaagctgcgcagaatttttcctcgagctaagattcaaaccttttcgatgtttgagatcgaagacattcaaacctatttcccggatttgatcttttcgattattgagttaacgatcgaagtggattgtccagtgatcttaatgagcgagattcaaagcgagcttgattatttagaggtcagtgaaaatcttagtttgttaaaaagcgatgaaaccttttcgattgaacgtgcgttttttgacttattttctgaaggcctgtttcggattgaacaaaagcggagctattctgacatcttagttgcattggctgatcaagtggaagcgaaggtgggatttgctggatataaggactcattgatggaacgcgagaattatttatccaccatttatcaacatggcgtcgcgattccccatccattaatcatgtcaggcaaggagaatcgtgtagcggtttgcttattgccagaaggtgccagcgaaacagagcgcgaagccaaaatcatttttatggtgtcgttaaaggctgagcagctagatattcaccaaatcatctcaaaagaattaagcaagctaatgaaccatccagccgcaatcaacgcgctggttgaaagtaaagattaccatgaattttactatacattaaaacgtgttttaggaagaaggaaacaaagtgaacattgagtttttgaaaaatctatccaatgcagacggcattgccagcaatgaaaaagaagtacggcaagccattttagccgagctggaggaactgccttacgaaaaacagacagacggacttggcagcttgatctttagcaaaaaaggccaaagtccgaagagtattatgatctgtgggcacatggatgaagttggctttatggtgcgcagcatcagtaatttggggttgattcatttaatggtggttggcggtgtcaaaccaattgcccagcatctgcaaaaaatccgcatcacgacctttgatggtaaaaaaatcagcggagtcattaacggcgagtatcgcgatggaaaaacggaaaatctttattgtgatatcggcgcaacgacagctcaagaggttgctgagttaggaatcgaagtagggaacatggcctgctacgcaacggagtttgaagaatttgctgtgaaggatatttacgctggaaaagcctttgatgatcgattggcttgctttgtgatgggagaattaatgaagcgcttcgcaaatgcagagctgccgttaaccgttcattttgccaatactagcagtgaagaagtcggcattcgtggtgcgaagacggctgttcaagccgtgaacccggatattgttttcgtgattgatgtcgccacttttagtaccgagttcgttcgtgatcacacgaatcagcgacaaatcggtcaaggaccgatcctaacccattttgaccgaaccttagcaccgaatttggaaatgatccactatgttaaggaaacagcgcagagccaaaatattccgctgcaattagacatgttcaattctggcggaaccgatggcggagaagcccataaggtgaatgaaggcaaaccgactgttgtaacgattttgcctgttcgctatgggcattgtgcttattcgatcgtgaatataagagatgtgcagcaaatgatcgatttgtatgaaagcctaatcaaaaactttacagaagaaacgtatcaccgcatggtggactttatttaaaggggatagaacgacatgacaaaagaagaacaagaaatcgtccaattgatctcgatcgctggcgaaagcaaagccaaagcctttgaagcgttgaaatgtgtcaaaaccaaggattttgatttggccaagggactgatcgaagaatctcgcagccttgatttagaagcccataatatccaaacggagctaatttctcgtgagttgaatgaagaggtggagtcctcgaatgtcggattattgatggttcacgcgcaagatcattacatgaccagtcaattggctcgtgacttgatcgaaacacttatttcagtattgcaataataaaaaaataaagataaaggggaaaaagaacatgaaaattttactatgctgtgccggaggtttctcgacaaatatgctgatgcaaaatatgcggaaggtagtgcaacagagtgccaagttgaacgatgcggactttgatttcactgcgattcccgcagattccatcgaaagtcaaattgatggctgggacattgttttagtcggaccgcaaatcactcataaaatcgattttatcaagtcaatcttagaaccaagagatattccttatgcggtgattgataaagatgtttatggacaaatggacggcgcaactgtcatgaagcttgcgttggtcactcataagaaacatcagttagcaaaacaagccgtttaaccagataaatgaggaggaataccatgttcgcaaaatttgaagcatttatgaaccgattcttcgtcccgttagctcacaaggtagataaccaacgccatttgagtgcgatcaaagccgggatggttgctatgacccccttcaccattttaggaagtttcttcgctattcttccagcattgccgaatatgctgggagagtccaatagcttcagtcaatttattttatctaatgctgagcttttcaatctgccagttaccctatcgacaggattgatcgggttgtatgcttgtgcggcgatttcctataatttgggaaatcattacaaattatacattcctggtgcggtgaccttatcactttttggctttttgtttatgacggctgtgtttgatgagaatggtctgttagatattacgaactttggtgccaaagggttatttacggctatgtttgtggcattgatcacggttgagttatacaacttctgtaagaagcacaacatgacgatccggatgccagaaggggtgccagattttgtttccaaatcctttgaactgattccagtcaccttgttggtaggcggaacctttattcttgggcgcttcgtattgatgcaaacagctggggaacttccaccaacgatcttaactcgcttcttgtcgccgttggtcggctcgatggacaatccatggtcagtattggcgttaaacttctgtatctgtttgattttcttttttgggattcattcatcggttttcagtccgattactcgtccgatcatggtagcgtttattgctgaaaatattactgctttccaagcgggtcagccgattccgcatttctatactgcgggagcgtcgagtgcgttctttggttttactggctgcggaatctcgattggctgtgttgtggcctgtctggtttcgaaatccaaacgctatcgccaaatcggaaaggtctcactgtttccggcattgtttggtattaatgaacccattctctttggtgcaccgattattttgaatccattgatgtttattccgcatgtctttggcggcgcgatcattggaacgttgccaatgttctttatgcattggggattaatcaataaaccaatctttgatccgccatatgttggtgtctttttagaaggcttcttgaccaacggcgattggcggacaatcctagtcaatggactgcaattatttctagctgtcgcgatctacgtcccattctttaaggtcatggagcggaatgagctgaaggacgaagcgaagaaaaaggaacagaaaaatatcttcgaccaaggcgataccgatattttggatggtttggacttagacttctagattggagtattacagatgagaattgagaaaatccaacagcttttacaagagtcggggaaagacgcaatcatcatcaaaaaccgtgagaacaaaaaatattttggttcgttaggaggcagtggcatctatctagttgtcacgccttcttcacaggttcaattttttgatggtcgttaccggcaggaaataaaagacctaacaaatggttttgaaaattatgaagtcccccaaggcagttatctgccaaagatttttgattggctgcaacaacaggggattaagcaattagcgatcgagccgaatggattgtcgatccaagagtatcgtgcgttgtcggaagaatttgccgtcgatatatggtcgcatcagcttcaagaaatccgagcaatcaaatcagcggaagaaattcaactgattagaaatgcctgtgccttaaccgatgagatttttgctgaattagtaccggaaatcaaaattggcatgccggaaaatgaactaggagcgttgattcattatctttcattgaaaaagggagcttcagcgatggccttcgagccaatcgttgccagtggtccccgcagcgcgttgcctcatggacgcccaactgaacgagcatttgaacagggggatttcattacgattgattttgggattgtcttgaatggttaccagtcagatatgacgcggaccgtgatgctaggcgaggctaataatgaagtacaaacgatttatcaagtagtaaaagaagcccagcaagcagcttcggactttattcgtgaaggcgtgaccggtcaggaagtcgacgcggtggctcgtaaaataattactgaagctggttatggcgactatttcagtcatggattagggcatggcatcggcatgggcggcgatgtgccaatcctgaatccgaagagtcaaatggtactaaaggaaaacatggtgatgagcgttgagccggggatttacctgccaggtgtcggcggtgtacggatcgaggatgatgttgtgatccaaaacggcatcggggtcgccttgaatcacacgacgaaggaattagtgagcgtaggtgaatgctatgtatgatttggataaggtgattgatcgcaaacaaggcaatgcccgtaaatggagcaatcaagtattaaaggaaaaattcggcttagctgaagacgcgattccgatggatttggcagatattgattttgaagtcgcacccgcgatccaagcggcgctcatgaaacgggcgagtattggcgactatagttattcttatgtgccagatgaattttatcaggcagtgattgattggaatcagcggcgctatgatacacacatcgaaaaagaatggattaagctgaccttcggaacggtttcgaccttgcattatattgtgcaggcgtatacggaaaaaggtgacggggttctgatcaatacacccgcctacgatccctttgcggaagctgtagaacataatgagcggaagcttttttgcagctcactgattaatcacgacaaccgatattatcttgattttgaagatatggaacggcagatgcaggaaaataagattaagctatttattttttgcagtccgcaaaacccttctggccggatttggacgaaggatgaactgtttcgtttagcagaattatgtcttcgttacgatgttcttttggtctgtgatgagatccatcgcgatatcgtctataaaggacaaacctttacatcgatttggaatgcccatcccgagatcgcgcagcatagtgttttgtgtctgtcaccgaataaaagctttaacttaggcggcttaaagacatcttatgtggtgattccaaatccacaaattagagaaaccttgctggatcagctgcaaaaaaattccatcacatcgcctcatgtttttgctgtaccggctattgtggcagcctacaacgaaagcgaagcatggctggatgaaatgatcgattatgtggcagaaaatatgcaaatcgtttacgatttctttgcagaaattccagaggctaaagtgatgccagccgaatcgtcatttttggtctggattgatgttcgcgattggttcaaggatgagacggacatgcaggaattcttccgacgggcaaatttaacgatggtcgtcggcagctattttgttcaggacggcgaagggttcgttcgcttgagtattggtatgccaagagaattactgttagaagcattaggacggatcaagaaagaatatgtacgaagcatggagcatgcttaatttttgaagactagcgcattttttaagatgctctggtcttctttttgtgctccttcactagagcatcccagatttctgtggtacagtgagtcagtgtgaaactttagaggaggacaagatcctatgcgaaatattaaattaaccatcgaatacgacggcaagcgttacctaggctggcagcgtttgggagattcagaaaaaacgattcaaggaaagatcgaaagtgtgatagcgcaaatgacgggtgaaaagatcgagatcattggttcaggacgaaccgatgcgggaacccatgcgagaggacaagttgcaaatttcaaaacaaattcagaaatggctcgcaatgacatgctggtctttttcaatcgttatttgccaggagatatcgtagtgaaaaaggttgaagaaatgccggaacgcttccatgcgcgttataacgtgaagggcaagcaatacagctattacgtctggaatgatccgattccaacggcttttgaacgctatcatagtttttacgttccgcaaacattggatatggataaaatgaatgccgcttgtgagaaattactaggaacccatgatttcattggcttttcggcattgaagaagaccaagaaatccacgacacgaacaattgagaaaatctcgattgaacgcgactacagtatgctgcattttacctttgtcggcaatggcttcttgcacaaaatggtccggattttgatgggcaccattttggcgatcggagctgggaagctctcggtagatgtgatcgatgaggtactagaaaataaagttcgcgcggatgctggtgaaacagcgccagcgcagggacttttcttagacgaagtttattattaattgtaaaactggttttggacgcttttgtgtctgaagccagttttttcgctgatcgcttccttcctagcctataatgaatatatatgacgagaaagagggattattgatgagaaagttgtttttggtttcgttgtttcaaaacgtttcaggattattgaaatctgttgaagaagtgaaaggtaagactgtaacgtacattccaacagccagcaaagttgagaagctaggcttttttatccgcatcggcaagtgggctttacgatttagcggaatgaaagtagaagaactagaaatttcacaggcaagatttgaacagattcgaacaacgttagcaaaaaatgacatcatctttttagccggcgggaatacctttttcctgcttcaggaattacgccaaacaggagcggatcagctaattattgaggaggtaaacaaggggaaactgtatattggagagtcggcaggtgcgatcgttgcttgtccagatatcggctattcttctatcatggatgatccgaaaaaggctgctgacttgactgattacactggcttgggtttggttgatttctacgtggttcctcattatcagagtcgggaatttaaggactcttccgagcagatggtgcaagaaaatcaggcacagaaaaaattagcgatcatcaatgatcatcaggcgatttgggtttgggatgaaggggttaagcttttagagagatgataaataaaacagcagattgcaagtcatgaaaacttacaatctgctgtttgtttttaacttctcaacccacgtccacgatcaatcaaataccagcagacgctataaagcacaacgataaataatactaaaatggacattgagacaacgatcgacacatccatcacaccaaggaagccataacgaaaaccagagatcatgtaaacgatcggattgatttttgagacagcttgccagaatggcggcagcatcgaaatggcataaaaaactcccccaagatacgtcaatggttgtaaaacaaaggttggaacaattgagacatcatcaaaggattgggcgaaaatcccgttcaacagtccagccaatgagaataaaatagcggtcatcaacaaggtgatgacaacgatcacccaggaatagacgtgcagcggtacgaagaacaaggaaatgatcgtaactagtgtgcctaccatgacacttcggccaactccgccgattacaaatccccaaataatgatatgggttggaacgggtgcgactaagatttcctcgatattcttttgaaatttttgtgaaaagaaggaagaagaaacattggcataggagctagtaatagcagacatcataattagacctggaacgatgaattccatgtatgaaaagccagccatatcaccgattcgtccaccgatcaaattgccgaaaatgacaaagtataaggacgttgtgatgacaggcggtactaaggtctgtacccagatccgcaggtagcggttggtttctttgactgccagactttttaaagcagtgaagtatagattagacatgattttcctccgtaatttttaggaatagttcttctaaacggttggatttattccgcatggaaaggactttgattccttgattcgtcagttgttcgaagagctcattgattccttgatcccgtacgacttctacttcgagggtttgatcgtcctcaaaagtatagttgaagccagtgatttccggctttttgttgtaaggagccagatcaaaaataaaggtttcaaattgcagcttggctaataaggatttcatactggtattttcaatcaattcccctgattgaataatgccgatgttgcggcaaagcatttccgcttcttccagataatgggttgttaagatgatcgttgtgccgctttcattcagttctcttaaaaatgaccacatctcgcggcgcagctcgatatctacacccgcagttggttcatccaagattagcaagcgcggttcatgcatcagggcgcgggcaatcatcaaacgacgtttcatcccgccagaaagcattcgggcacggacattgcgtttttcccataggtcggattgcttcaagtatttttcactgcgaatcatggcttctttacgaggtacgccgtaatagcccgcttgattgacgacgatttgttgaacggtctcaaaagggttgaagttgaattcctgcggcacaagcccgatttgctgctttgccattaccagctctgtgtccaaatcatagtcgaaaacttttacgcttccagcagttttattgactaaagaggtgataattccgatcgtcgttgattttccggcaccatttggccccagcagcgcgtaaaaatcgccttcttcaacgactagatcaattccttttaaggcctctacaccagtggcatagatttttcttaaatcttttatttcaagtgcattggtcattaatgtattctcctcgtttctgtaaggtgttgattttgatagcttcagtttcgtttcatccaattctctattctatcattgtttttcctgatcacaagcctgaaatgcttaattagaatctgaattttttgaggtttctctttcatatttgttaaaatgaaaaagaagaagcggaggaaagcgtatgtatttagaaaagttgaaatactttattgatttagtccaaactggcagctttaccaaagctggaaaaaagaattttgtttctcaagcaagtatcacacaacagattcgtttattggagtctcactttgcctgtcagttaattgatcgctcgacgattcctgtaaaaccgactgaagctggaaagattttgtatcaagaagcccttcaactgatccagcaatatgatcgattaacgcaacggatggcggattacaatgagcaaagaaacagagttcggatcgaatacacttccatcatggatattcaattgttttctcagattgtgcaggataaaaagcttgaagaagaaaacattctgttagatgtggaaaaagtgccattaaagggtgtcgctgaaaatttgctgaatcatcggtatgatctagcaattagttttgattcggaattttttgaagaaaagcaaattcaaacacttcctctgtattatggagattattgtgcagtggttggtaagaagcaccgttttttacaaaagaatcattgacgcttgaagagttgtacgagcaatccattgtgatgctttcgccagaaacgatcggaaaatcctactatctaatgctggagcatgcgttgcaggatgggtatgctcctaacatcgcaaaagtgaccaacgatatcgagacggaaatctttctgatccagaacaataagatggtgggctttttccctgaaaattacccattgatcgaggatgacatggatctgaagtctttacgcatcgaggattctcaccaccaatttgagattgttttagcctatttagccaacgaacaaaatgcggctgttcagcgattgcttgagcttttgaaagcataataacttttacttatagggcattaaatagatgtattggcatttgatcactaaatcacataagcttaacttatcaaaaataaggaggctttattcaatgaataaattgattttgacaggtgtagatggcaatttaggcggacaggcagccgagtatcttttgacaatcgcagaaaaggaccgtttagtcttttgcggttatgatcccgcttcgttagaaaaattttcagctcacggtgtagaaacacgggaaaccaatttcaatcatgtcgaaggattagctgaaaaatttgcagggggagaagtattagcgttgatctcaatgccttttgtaagagaaaaacggcaagctgcccataaaaatgtcgtggatgctgccaaagcagctggtgttaagaagatcgtgtatacttccttggtcaatgcggcagatccagaaaatccaagtattgagaaaatcgaccacgcgtttacagaaaaatacattgaagaaagcggacttgattatattttcttacgcaactctcaatatgcggaagcaatgattacgaattatttcacctatgtaaaaggcgacggcgtgctaaccaacagccaaggtgatgggaaaatggcgtatatttcaagaaaagattgtgccaaagctgttgcttatgctttaaataatcaaacgctgcatcatcaaattctaaatatcaatggaaaagagttaatgacgatcagcgattttattgcaattggaaatgaggtcactggtaataaggttagctacaaagaaatctctgatgaagaaaattatgcggtattcgatgcgatgggcgttccgcggaccacagaaggaaaattcaaagaagattcggaggctcctttttcttctgaaggaatggttacttttgctcaagcgattcgggaaaataagatggctgaacacaccgatgattttgaaaaattgaccggtgacacgccactaactgttcgctatatgtttgaacatgcagaggaatttcaggtaggcgaacgccattcgaaagatgtgtaatggataaggaaagtatctcacttataagataggtggggtgcttttttattatcagtcattttgccaagctatttctaatgatagaatgaataaaaaagaaggcgggggttcaattattggaagtgatcgggatttatgggattttgtttgggattgtaggaatattctttctgatctatacctattttttgtaccgcaagaatctaaaaatcaaggcgcggatcaaggcggagtatgggaaaaaaccggaatggaaactggatgaacgggattatgccagtatgaagaagtattatcagcagaagaaaacagatgagccaacgattgatgatattaccttcaatgatttaaatatggatgagatttttaaacaggtaaaaaatacgcagtctagtattggggatgaatacagctacgatttttttagaaggcagaaaaatcccgatttgactcattttgaagcggctgttcagtgtatgagtgagcaggctgaagctcgggaaaaactgcaatttgccttttatcgaattgggcggaaaaccaataatcagttggttgaattattactggagcccagtaagtttcctaaaatagcgatgctgccaattattttggtgacggtagtcggaataggcagcttgatctggctggcagtagatattgattatgggattttagctgtctgtatgagcttttgtgtaggtttgattttattttcgatcgtgttgcgaaaaatttatcaggcgtttgaagctttggggatgtttacacgcatggttcgggcggcgaaggtgatggtgaaactagagcttccggccttcaaagaagaaaccgatcagttgcgtaaaaatcttaaagtgtttaaaaacattacaggactggcagattatattgtgcaaatctctggctcttccaacagcctaatgatgatcattacttcttatttttctttgtatggctatgcttattttatcatggtcaagctgtttcaaaagtaccgcagtgaagcattgaaactgtatgaaaccatcggatacatcgagctgtgtatttcgattgcttcttatcgagaaagtttgccatattattgtctgccgaattttaatgataatgataaggtaacgtttgaagagatcgtacatccgctgttaaaagagccgatcccgaatacgcgcagtatgggaaataaggtgttgatcactggttcaaatgccagcggaaaatcgacctttgctcgaacattagcgatcaatgccatttttggacagctgtttaatacttgcttggctaaaagcttcagttttaaaccatgtgctgtctatagctcgatgaatctaaaggatgatattgttaccggcgacagcttctatatggcagagatcaagtcgctaaagcgcttgttaaaaatcgctgaatctaaagagtatgccatgatttttatggatgaaatgtttaaaggaaccaacatgatcgaacggatctctgctgcttcgattattctgaaaaaatttgctgacctggattgtttcatttgcttggcaacacatgatgtagagctgagccgaatcctaggtgaacgctatgaaaactatcatttccgagaggttgttacagaggatgatattctatttgattacacgttgcaagaaggcgtaacgactggcagtaacgcgattaaactattagcctattgtcattatgatcaagaaattgttgatcaggcagaaaagtatgctgagaattatcgactatcaggcgagtgggaaaaactataagcaagcactcaagaccgtgtccaattaattggacacggtcttttccagttagttaaaataacagttttatacctgtagcgtattcaatagtttccgtaattcagacacggatatttgtcctggagcggaagctgttccggcagaaccgaacgtcgcagctgaaccaaagacttgtccagaaatacggctaatcattcctagtgttcccatagacatagtaattaatggacgatctgcataattttcatacatcttgcgggtagcttcgaggagtgtcagaacatcctcgctatttctaggcataacagcaattttgcagatatctgcacctttaagctgcatttgctgcagacgagaaagaatctcttgtttactaggagtcttatcgaagtcatgattacataagataactttaatatccttttcgtgggcagcggttattgtttgtgcgactaatttgtcaggcataaagagttctagatcaattaaatcaagacagccttgcttgattaacgtctcataaatttcaaaatacttttcttcacttaatggcaactcgccgccttctttataagttcggaaggtgattagcagtggtttattgagtgctttttttattttatgagaaagctcagctacaatttctggtttttcaacttcttgaaaaaaatctatacgccattcaacaatatcacagtcaagttgttgaatatgttcagctgaggagagtaggtctgtttctgttcgatctagcaaaggtacaattattttaggctgaccttcaccaatggtcacttggtcaattgttactgtgttcatattgttcctccattaattatttaagttcattcaactaatttgtttgacgtgctatgcggataaatctactgtttttcgataacgtataaagataattacagctaataaaaagccaattcctgcaataatggtatcaaacaacataatactacgaacattgttctttgcgatggctgccgcaataatcgggatcaggaatgaagcaatactgccaaaggtataaaaaatccctgtgattgttcctttacccgctggaaacagttcgcccattacagtgagaccaagctgcatgactccgccggcagcgaagaagcctaccaatgcagcaccaatcatcatcactaacggtgtagggaataaccacatgataagaatcgttacaaatgagacgagagtataaagcgttactaaataaacaggccgcacttttgtcgctagaacagcagtcacagctacacagataagggagccagttgagtaataagaaatcagtaaatttgcgttatcagtggtcatttgtgcaacttcctcaccataaataccgataaactgtgagattaaataaaaagttgcttgagaaataaaaccataaataatgaaacagacaccctcaattgctattttaggctgacttttaaatgtaacggcttgtatttctgcctgttgattttccttagcgtcttgatctggaaatggtcgtttcaataaaaatagaccatttaaaacaaaaacgataatcggaatgataaaggaccagccaaaccataactgattggtattgataatttttagcataatcggtagggtaaattgtccaatttgtacgaatgctttgattaatacattcgctgttcccgcctttttagggaaagattccataagggctggatacgtgcctgagtctaagaaagagtttgaaacaccggcaattactgcaaaaatcatagcagtcgttacgcttttactgtacaaaataccaaagaaatacaaagagtaagtaacgatacctaaataaatgaagggctttcttccaaatttatctgataaacggccggagattaaaatagcaatcaagcggccaattcctagcatggagatgactttcgctatccccattagatccgtatcccactgtcccattaaagctttttgattctgggatatgatgataacacccatcccatgaataatataattgatgtaaagaccaatcgctgttggtaaatatttatttttcatccatactcctccgcctattcatcaaataataattctttaatatatgtgactggcatttcttcatcagtgaacaattgaaaagctgcagctccttgatagagcatcatacccaaaccgtttataactttttttgcaccatgttctttagcaaagcgtaaaagtttcgtttctcttggagcataaacgacgtcaaaaaccactaaatcagatctaatcatttctggatcattaatcaaactttgttcttgtaaaggcttcataccaacgcttgtggcatctatatagatactacttttttggatggctgatttaaatgctgcttgatctgctaaatcggttacagttgcccgacagttagtattatcattgattttttttgcggtttccttagcattttcgaacacatcatcattaatgttgaaaatatacagttcttttgcaccatcaaaagcagcttggatagcaatcgctgttgccgccccgcctgcaccagtcaatgtaatggattgatctttgactgttacaccctcatcttccagtgcttttattgcaccaatcccatctgtgttataaccgactaagtgtcctttgccatctttatttgtgactgtatttacggctccgattaatttagcttctggtgaaatttcatctaaatagggaataattgcctgtttattgggcatagaaacattggaaccgcggatacccaatgcacgtattccatctacagcaggttttaaagtagagttgtctacttcgaaggcaagatatgcatagtccagccctaatttagcaaatgcttcgttgtgcattgttggtgacatactgtggcgtataggagtagctattaggctgattagtaaagtgtgtccagttaatcgttctgtcattgttcaattcctcacttaatatttattttttcattatgaaattaagtacaaacgtatgtggcatgcatcgtttttcgttgagtttccagatttttaatggttttcacaacatcgcgagcttccttagtgccttccatgattcttcgagctaccttactgtcaccaatgttaagtaaggtaatattattcttttttgtataatcagttaggtcggataataaaggagcgtcagcacgcatacctaaacaaatgaaacctaaatcaaaaggtaatttaaggcgttctccttcagctttttcaacgatgaaacaattcttttgtacttccatcaatttcgtagaagtgtgaacatcaacattatagtcatgaatgatttccatcattccaagtttagtgataatatctaaatcttttccaagttgatcaaccatttcaacaatatgaactttttttgcaccattttctgcgtaatactcaaccacatctaaaccaactgcacctcctccaataacaacgacttcttttccgtcaaaatcattgaattttttcatatctcccaaaaggtcaaaaatagagaagacttgtcgattggatttagctaattcttcgtgcagtcccacaattggtggaagcaatggttttgcaccggtagtattaacaatcaagtctggcttttcatttagatcttctaacgtaaatcgatgatttaaatgaaaagtcaaattggataattgttctactcttctcgttagataggtgacgaaatcattgattcgttgtttgtcaggaaagcgggaaatttcatgggctaatccgcctagataacctttctcttcgtagagtgtgacatctacaccaatttccgcagcactggctgcagcttcaagcccagcagttcctcctccaatgacaaccattttcattggtttagtgactggtgatttcttgtaggtttcctcatagtaaagatctggattaacagtacaacgaattggacgtgatttcgaaatgcgatgatctgcacagccaatattacaggagatacattttcgcaatagatattcctgaccattagccactttattaacccaatttggctccgcaatcaatccgcgtcctatggcaagtagatcggcatctccatttagcagaatttcttcggcacgctgtggactacgaatattaccagaagtaacaatcactttctctggaaatttattcttaaccgctttagccatataacttcgccaaccatccttaagattcattttgtcgatttgatattgtaagttatcatttaatgctgctgagacattcagtatatctacatcttcagcaatgtaactaagcatttttatagtatcgtctaaggtatttccatttggtaacagttcgtctgcgctcacacgtaaagaaatcggaaagaatggacccactgcttgtctaaccgcttgaatgaccattcgagcaaaacgagtacgattttcaagtgttccaccgaattcgtctgttcgtttgttataaattggggataaaaattgactaattagataagaatggcctgcatgaatctcaacacaatcaaatccggctttttgtgcacgtaaagctcctgcagcataattttgtacgatttgttcgatctcagcttttttaagtggccgtggaacaggatttccagctttgctaggaatatctgaagaagaaaccgcttgtactccttgcaaacgtggttgataagcagaagcgccagcatgattaatctgtacagatgtagcagctccataggcatgcatccgttcgttaaattgccaaagaccaggtatgaattgatccttgtccattcttaattgtgttgttccgtttgttcctagcggataatcaatacaaatgttttccagtgtaattaatccagtaccaccttttgctcgctgttcgtaatatgaataatgctgttcattaaaggttccatcctgatttgcaaaatttgttcccattggcggcataatcactcgattttttaaggtcaaacgtttaatcgtcaagggttcaaacaatgcttgatatttttccataatattcatcctctcgtagataatgagaacattcacaatatctcgccttcattctacgagaagaaatttataaaatctaatgctttatatctatattaatcataaataaaatttatcatttagtttttaataggtttttccaaattaagaaatttgtagcgttgctgaataaccagtgaggcgataaaacctaataaaattaaaaatacatcaaaccaaaaaacgtattccatcccctttttgcttataataccggtgatgtatggggttatcataacagacgtcgaggttgccaaggagtaataactagtatagcgaccttttctactagggaaaagttccaacattagagcgagtcctaactgccaaattccaccagcggcaaaaattccgattgctaacgcagctataacagttgaaataaaactaggcgaaagtagcatccaaactagtgataagccagaaattgcaacacaaaaactaattaatttcgggatgtttacaccttttttcacaattccggatgtgaaaaaaacagagacaaatgatccaacgctgtagaggctaacaaaaatcagactgttttcgtgggaagcgacatgcatggcttcagcgtattgtggaatccaaagaataaaaatattaaaaatagaaactgagacgaaagagaaaactaataaagcaattccatcaattttaaaaattcctcgattgataattttgcttgaggaagatattggttcgtcaacgatttctgtggataatgaacttaggggagggaatttagcaaaagctagatagcccaaattagccaacaagcaaacggcgcaaagaataaaaggccagccgaaaaatagctcttcttttagaagaaaacgagtaataaaaggcaaaataaattgccctaaagaaataaatgctttatttaagacgcttagtgagctgttggttttttcatctggataagcttctaccaatgtagggtatgtactagtatctaaaaaagcattactgactccgccaaacattgcgaagaaaaatgctgtttgataatttgggctgtataaaacgccaaaaaagaaaagagcgtaagataaaatggcgataatgacagtttttcgacgaccaaaagtatcggaaaaatacccagagaaatagagactaaggattcttccaaaaccaattgcactcattactagagtgacttgcgtggtacttgcttgccattgattttttaattcagtcatattttgtgaaaggataatggcagccattccttgaaagatgtagttaaaatagagactcccaattaatagacgatattttgtaggtttcataaaaattctcctcatgtgattttattcacttgattataccttaatactaggtcatttgtatcattaaaactaatgctttattttgataaaattgataaaatctatttattgaatgaggtggaaaaatgaatttaaggcaattagaattttttattttactcgcgcaaagcgagcatatgaccaaagcagctgaattggctaatacttcacagccaaacgtgagtcatgcaatgaccactttagaacaagagttaggcgttgctctatttgaaaaaaagggacgaaatattcgcttgacccgacaaggtaggatcttttacgaatatgtccaaccagcacttcaaaaaatagatgaagggcaacaacgactacaagagattatagatccattttttggcgaaatcgagtttggatttatttatacgatgggttcaactcttgtacccaaactaattcaaacatttcaacaaaaaaaagaaaacaaaaggattaagtttctttttcatcaaggaaattctaataaaatcataaaaatgttattagatgatacgatcgacataggtatttgttcgaagattagtgaagacagcgatctaatttttcaacgtttgacccgtgaaaagctagtattagttgttccattacatcatcctctggcaaaaaataagagtgttgaaatcgaagagacattaacttatccctatgtatattatgggaaacaaagtggactgcgtccgtatttagatcgtcaattgaaagagctagatatagcgctgactgttcagtgcgaactggaagaagatcatagtattttaggatttgttggtgaaggttatggaattgctttaatgcctgatattccttcgatcacttcttatccagttaaaaaaatcgaaattaaaaaccacctagaagacagaaacgtttatttagcagtaaaaaaacacaacttagaagttcctgtgataagaaaattttatgatttttgtttaaacaccgacaaataaaggtgagtcaaagctttcttaacctctgtgtaagatataattctgattagtttgcagcgaggaatgaagaggaagtgatggaaggaaaatttgaaattgctttattaggagacggcaagttattctaagctgaaaatacttcattgttcgatgatgatatacgtcacattgtcacagtcagatgaagaaaggaataccaaaaaaatccacgaaatcagatataccaaagcaaacagccattagctattccattccattaaagtagtttaaatcagtagcttaaatcttaaatagataaatgtaacttattttcttgtagctagataaaaagctagagaggttctaatcaatacccacctactgatagagcaagaaccctgcaagtcctgccacacacatcaaaacaatggggttaggtttgaatttccgcagaatgatcaatgaagcggtgaataaaatcgcagctctccaatcaaattgtaagagcagattgctggaaaagtcggatgttccgaagaaggccaataaaagaatggtaaagcccgccgacatgatcaagccgacagaagaagcttttaggcttttcagagccgctgccacatagagagagtcgttatgcttttggaaaaactgatataggctaatggagattacacagccgcctaaaatacagccaatggtagcgacaatcgcaccggaaattccgttaatctgcatgcctacaaaggtcgatgtattgactgccagcggtccaggggtcatctgcgagatggtgataatatcactaaaaactttctcactcagccagccctgctgatgaactacctgttcttgaatcacaggaataatggcatagccgccaccgatactgaatagcccgattttgagaaaagtcaaaaataattgcattaggaagcctcccttgtttgttgaaaataggtatcgagtaaacaaagtccaacgctgaaaaatagaatatagatcacgtttaaattaaaaatggcattagctacaaaagaaattggaaccaataggcgtagtagtctagagctttcttgccgaatcagctgatacatatcaataacaatatcgatgatcaaagcggtgacacaagcctgcatgccttttagaacggccatcaccgttacgtttgcggcgaatgcggcgtaccagttagagatcaatcccaagatcactaaaggcgggatgatcgaacaaatcgcgttaatgaaaactccaggtagtcctgccaccttttttcctgccaaaacacttagattaatggcgatggctcctggtgaggattgcgcaacagccgccatctccattaattcatcattggagaatagtcgttttttttcaacataatacttgcgaatcatgggaacgaccacataaccgccaccgaaagtgaaggtgctgataaatagactgatcgaagccagccataagtaatgcttgagttttgtcatgctgccaccctttcttactttctctctagtataaggcttggtttggtatgtgtgaaatgatagtattgaggtgtaggtatgaatgctattcatgataagaggaaaccttatgaactataaacaatgtgtgatatttcgtgagatcgcgaaaacgaataattttaccaaagcagcaacgaacttatttttgacgcaatcagctgtttctcatgcgatcaaagatttagaagaagaagcgggcacgcaactttttgaacgactgcatcgcagtgtgaagctcactcctgcgggagaattgcttttgcgagagattcaaccgatcattgaggagtttgagtctgtcgaagcacgtttgcctgatttagagaagcagccgccattgaaaatcgcctcctgcattacgtatgcccaaacagagctgcctcagctattacaacgatttagtgagcttcatccagaagcgcattttaacgttcaggtttttcctgcttcagaatcgattgctcgtttagaaactggcgaggttgatcttgcctttattgaaggcaaggttcagcaagcttcctttcaagcaaaaaagatcgcagattatcggttgtgtgtagtggcggcaccagatttcgctgaagagcagcttagtttgccagaacttttgcaacgtccgcttttattgcgtgaaagaggtagcgctgttcgtgaagcctttgaatcctttgttgttttacagggcttcaagccttttccgatttgggaaagtgtcgattcgcaggctttggtttcagctgttaaagcaggctttggtttatcggtattgccgtaccgtctagtgaaggaggagattttgctaggaaaactgaccgaggtcaagattacagattggcagctgaccaatgacattactgctctggttcgtaaaagtcgatatcaatcccggatattggctgaattttggaaaatgctgcatcaagtaaactaattttggacaagtttgtttgaatgactttctaaaatatttacagtatattaaactattgaataaagagagactaactatatagagtcaagtaaaaattagccaaatcaaaaaatattttataacagataattccgaaaaaagggtacaacaaataagcttcttaccattagtttttttgaatgttcaatagctaatcagaaacaattatataaggctcgtttttagtcaaaatagcatgaatcacgtaacaaagcttacgagaaaccgcacctaaggcagttagatgatgttttccttcggaaacttttttctggtaaaacgcactaaaaacaggatcacattgagaagctactaaagccgccgaaaacaaggcttttcgcaaatatggagaccctcgtttactcataacattatgcgttgcctcatattgccctgattgtgtcacggaagcgtctatcccagcgtaagcaacgagttttttcgggttagaaaatttttgaatatctccgatctcaccaagaatagtcgcaccgtttataggaccaattccaggaattgtgagaataacagaatttaaagtgtccattatgtgcttgatttctctttccgtttcctttatttggctttcaatgaattttaattgttcaatcattgaacgtagttggaaggtgaacgcttcttgagcaaattttactccaaaggagttagaagctgcttgcttcaattggtccgctttttctgccttgattcggttcctgcttaactcagctaagtattgggccaaagtttctgaggaaatgttttctaagtcgatcggggcactaaacgccagcaataactctttagaagcttttccgaaaacgccctgcttggtaaaaatcgtcgcgtattctggaaagacttgatccaatacggctataatttttcttttgaagtcgctcgctgtacctactaaataagttcggtaacgagaaagttgtttcaaagaaaaaacattttcatcggataagaccgtttcgacaaatgagccatagcgcattaagtcagcaatcaaaacagaatcaataatatcgttttttcgtttccgtatttctgtacctttacgccatccgtctgtttgaaggggattcacaacgtgaatcaaataatctgattcgtgaaggtatgaaaagatggacagccaatagtgccccgtggcttccatccctataacaaagtcactgggtgctccggaatagtcgaccattcgctcaattaatgactctgctccttcagtggtgttaggaaatgaaaaaccttttagtaatacctttccttcctcgttcatgatagaagcaacgtgagtgcgtttaccgatatcaatgcctaaaaagtacatgtatatctgacctttcaaaaaaagaattttggattgaaatccactcaactgaaaagcgtcactaccttgtacgagatacggagtaaagtaaggactttcaacatctaactcatacgcaatccacttatcagagagaggagccagtctctcgagtgcgggttcaatgacccaaggggggaacggcttagcctctcaatccaataaatatattatctcaaaagaaatgagttaataccaaattaaaataacgatggttcatagggttatccaatcaaaaccggaaggttaaaaccctaactctaatatacaaggggttattcaattatgaaaacgactgctgaattaaaggcagaagcgaaggatgctttgagaggtaaatggggacaagcagttattctaaatctgattccgacattattaactgtagctgtgatgttctttgtggtattatcgggattaatctggtttttcattcatggatcaagtgacggcgtgattacttctgtttcagagtatcagcaaaataatgccagcggcggtggaacaagtttagtttcatcaattatcagcgcattgtttatgagcggaatctcttggacgtatcttgatttgctgagaggtgagcggacgcagatcgaaccgatgaaggacgcgtttcgtggatttcaaggtgcattcctcggtggtgtagttctattagcactatttacgaatattttcacgacattatggacattcctattcattattcctgggatcgtaaaagcctatgcgtattcgcaaagctattttatctattatgatcagcttcaacaaacaggggagaaaccgaaagtgttagacacaattactgccagtcgccacttaatgattggccacaagggccgtttgttttggctggatctaacgtttatcggctggtacctgctgactgctttaacagcaggcatcgcctatctatgggtggcaccttatatatccgctactaaagctgccttctatgaagacttgcaaagaaatatttaaaaaaagcaggactcaatcatatgattgggccctgtttttttaagcaaatcttttgttgttttgaatcgccaacaattgtgggaaaagatcagattgataatcggcaatcagttgcttatttataagctaattttattctatcatgaaggagatgttcactttttttctcgaatctgccactgcctcgatcattcgtcaattcaatgtaaacacgaaagataaaatttatttttcagggttgctattcatttagctatacaaaaatcttttataattgattaaagttcgctttttcaaaaaatgaaatatcgtaaagtttttggaattgagtattcagtaaaagcatacgaaaaggttaattgccagggattattaaatataatatgcgtttttttataaagtattattatatttaacaactttttaactgattatagttgacaatgttcattcattttgttaaattttgaaaagaaaaataaaatatgatttgttaggtgaggctcctatacaaacacaggctactgcccaaaaatgtcgagagacgccaatgggtagaacaggaattgtcgaatacaaggcttttcttaaggtagctaagatgtttgtctttacgttgtatagtgccaaaactcaacgattagatcgataagaatatttgtctttttaagatggatttgttaaggcctttcgctgagttttttagagcgaaaggccttttttgtcagtcgtgcttttcgcagtttgacttagtgatgacagctctaaaagaagtttttaataatttggctgaatgagtttagcacgatgatatgcgtacgagaataagatcatttttcgtgcttttcgaaaaatgaattcctagataggagctagctgtcagtcgtgcttttcgcagtttgacttagtgatgacagctctaaaagaagtctttaataaattgtagctgaagatgcttagcacgatgatatgcgtggtgaaactcaactcatttttctgctttttagaaaaatggattcattaaaatgaactagctgcgagtccaactttttgcagtttcacatcgtggagctacttgttctcaacggcatggctttctttcatggagctacttctcaccaaccgtctattttattttcaatcaaaaacaaaggaggaattatcatggtaaaacagtgtatatgctaacgagatggaacagtttattttaccgggaagccttgatgcttcgaaatcgggtgttgaaggaaagtgcgggaaaggcgtatttgttcgaggcaccgattgaagaaaagcaggatattcatttggtcgtgcggcaaggagatgaagtagtgggaacgttgctgctgcatcctgtatcaaacgcatttgttcagatcaagcaggttgcgatcgaaccgctgactcaaggaaagagtcttgggaagaatttgatgatctatgcagaagagattgctgaaagattaggtttttcgactattttcttaacaggcagaaagcaggcctggggcttttatgaaaagctggcttaccaagagctgccgtatgaatatcaagaagaccaattgattttgaaaatttttaagaaagaaattcgacaaccattgagtcgaataaccacaaaggagatgaaaacaaatggacgacagtagttcgcgaagaacgggtttatggatgatagaggaacggggcattggcaaattattcttgtctatttgtttttagccccttcatctctccgtgagcccacaataggaggcgcaaaaaaatgaaaacattcggaaatattcttttatacctaatgattgggataggattatggcgaattttttttggagagaaggaaagaacagtggaaaaagtaacgaaaaataaccaaaaggttaattatgatttatttgctagaaaaacagtggcgaatgtttttgagacctttcatacatcaaaaaaggggttatcagaaaaacaagccagcattgctagagagcgatacggggataacaagatctcttatggcaaaaagacgcctttcattttggaggtgctaaaagcgtatatcacgccctttaccttggtattaattggtctaggattaacctcgattacgacagatgtattaatggcggctccggcagaccgcgattattttggcagtgctattatttttacgatggttattattagcggaacaatgaccttgatccaatcagttcgttcgaatcatgctgctgaaaagttgaaatctttagtaaaagtcacagcgaccgttcgtcggaaaaatcaattccttgagcttcccatcgaggaaattgtctgtggagatgtcgttaaattatctgccggtgatatgattccagcggatgtccggttaacagtcacaaaagatttatttgtttctcaatcggctttgactggggaaagctatccagttgaaaaaagagcggagagtcaaattgaagcccaagattctgagacaagttacgaaaatatggtctttatgggaagcaatgtcattagcgggagtgcggaaggagttgtaatcgcaacggggaatcgaacgttgtttggcgatgtggcaaaatccttgagtaccaagcctgacttgacaaattttgaattgggaatcaagaaaacttcgttcatttttatcaaatttatggcgatcatggcaccaacggtcatcgtgattaatgggctgactaagggggattggatggaggcttttctgttcggtttatctgtggctgtaggattgacacctgaaatgctgccgatgatcgtaaccaccaatctggtcaagggtgcctcaagaatggcgaaaaagggaacggttattaaaaatatcaattcgattcaaaatttcggcgctgttgatgtgctttgtacggataagactggaacgttgactcaggataaaatcattttggaatatcatttagattgtgatgggaaggaagattcacgggttttacgtcacgcatatttaaacagctattatcaaactggattgaaaaatttgatggatgtcgcgattattgatgctgcgaagaatgaattggatacgactaaaatcaattatcaaaaggtcgatgagattccatttgattttgaccgtcgccgtatgagtgtggttgtagcggacaatgatggcaagactcaaatgatcacaaaaggtgcaattgaggaaatgctgcgaatctcgagcttcgttgattttaaggggaaggtcataccattaacagaaaaagcaaaacaagaggttctagaaaaagtaaaagaactaaacagcgatggcttgcgggtattaggggtggcacaaaaaaccaatccaagtgtcgtcggcgaattctcggtatcggatgagtcggagatggtcctaattgggtacttggcctttttagatccgccaaaggaaacgacgaagcaagctttagaaacactgaagaaacatggcgtgggagtcaaggtgctgacaggcgacaatgcgctggttacgaaatctgtctgcaaacaagttggtttggaatcagaagaattagttacaggtgaacaaatcgccaatctaaacgaagtacaattagctgacatcgtagaaaaatacaatgtctttgtcaaactgaatcctcagcaaaagcaacgcatcacccacgcattaaagaaaaatggacataccgtcggcttcttaggagacggcatcaatgacgctcctgcgatgaaggcagccgatgttggaatttccgtggataccgctgttgatattgcgaaggaatctgcagacgtgatcttactggaaaaggatttgatggtcttggaacggggaatcgtttcaggcagagaaacctttggcaatattatgaaatatatcaaagcaactgccagctcgaacttcggtaacatgttctctgtcttaattgctagtacgttccttcccttcttgccaatgctgccattgcaactgctatttttgaatatgatctacgatatttcttgtatttcgattccgtgggatcatatggacaaagagtatttggatgaaccaaaaagttggatctcggccaatattggcaagtttatgctttggattggaccaactagttcagtttttgatatcacgacttatctattaatgtactttgtcatttgcccagcaatgctaggcggcagctaccacaccttgagtccagcacagcaggtgacctttattgcgattttccatgccggctggttcgtggaatcactttggacgcaaacgatggtgctgcatgcgttgcggactccgaaagtgccgtttttgcaaagtcgggcctcattcagtatgattgctattaccactttaggaatcgctgtaggaacaatcgtgccgttcactaattttggcagaaacttagggatgctgccattgccaggaaactattggttatggttgtttgtcacaatggttctttacttggctttagtgactgtagttaaacggatttatattcgtcgttacggtgaactattgtaagcatccgtgtccttattcctcaataattcgacttggtaggcgctttcttttcagttatacttaaagctaacaatggtaaaaggaaggtgcagtacatgattgatcatttaagtattggtgtcagcgatttggaaaagagtaaggtgttttataaggaagctttggaaccattaggctatcaggtaaaattcgagatggaccatggtgtttgttttggggcagaaggaggagatatatggatcgtcaaaagcgaaccaagcaagatccatttggcgtttagcgcatctgatcgtacaacggtcgatcgcttttatgaagcagcgatgagggccggcggagcagataatggagcgccgggtgtacgacctcattatcacgagaattattacggtgcctttgtctttgatcccgatggatacaatattgaagccgtttgccacaaagaaatgtagtgaaaatgctggctgaagggtcagcatttttgttgctttttactgtttatcaggaatgttaagtgtgctgaattaaagtgaactaaaaatggaggtgaggtagtgagtaaatctcaatggtacagtgatcggtggggcgagccgacacatgatgatcggatgctgtttttattgttgacggtgggcgtttttcaagcaggattaagctggcaggcagcagcaagtaaacgggaagtcttcgaaagaaatttttgtggaatggattttcgcaaagtggcggctttttttcctgaagatattgaacagattgccaaagatccggaaatgatccagaatcggcgaaaaattaaagcggttgtccaaaatgcgcgagctatcgtgctgctgttaaacgactatgatagttttgctgactatttatgggatttcgtaggtggggtgccagtcctccatgagtacgagacggcagaggaagttccgaatacattgcctgaagcaacggtgatcgccaaagatatgaagaaaagaggctttacctttgtgggtccaattgttacttgcatgtttctgaaggcagcagggattatgcaggatcgggtgtgggatagttagaattggatactaacagcttgatgagtagaaaaagcaaagaatgaggaaaatatactcctcaattctttgcttcttttgttatagatgccaatttttttaaggaagctaaatactttcgatacggatgattccgtttttatacatttcatcaattagtttcttatctgtctgattatctgtaatgagtaggtcgatttgatcaatcggaagaaacgtatacagcgctcgtcggccgatttttgtgtgatcggtaacgacaattttttttgcagcagcgtcaatcatattttttttggtggcgatcaataattcattgaaatgggttaagcccttttcaacattaagcgcaggcgtagcaataaaggccttatcgacacttaattgctgcagggattcattagcaatttgtccgttgagcatatagctgtcgtggaaaagtgtccctccagtgacgatggtggtgattcctcgattggaccgtaaaacagaagcgatattgacatcattggtgataatcgtaatgtcttgcaactgcggcatttcattgagggtttttgcgatttgcagggtggtggtaccagaatctaaaataatcgcttcgccgctttttatataatttgtcgcatattttccgatttttgttttttccagcatattttcagttgcccgatcttcaaaatctggctcatcctgtttgatacttgcaggaaccactccgccatggattctaacaacaagtccctgtgactccaattcatctaaatctcgccgaatcgttgtttcatgaacctgaaaaatctctgacaattgggcaacagaaataaattgtttattttcaatagcttctagcagctttattctccgctctcctgttagcatgtttcttcatcctctcgctttcccagtgaaaatccccaccgttgaaagactttctcacttctcagtctagggaaaataatagaaggtgtcaatacatacagatgaaaagcgcgcatcaacgagcgtattcgagtgagactgcaactaaatagatttaagacctcacaatttaaaatcaatttttttgtttttttatatccaatcaaatgattcatttgtagctgttttactaatagcactctgatattttttaaataaagcgtttacagagctgtattctgatgctatactcgtaaacgagcaataaagagtttatacgagcgctcataaacgagtgataggagaggaagaatgaaacaaatgcttgaatcaaaagtttttagtttggtggaacctggtgtaattgaggaggtgaacaaaacgagaagtcttcctgaaaattgggtggctgttgagccgacctatgcgagtatttgccatgcggatttaagatattttgcagggttgcgaagacctgaagctttagctaaaaagttgccgatggctttgctgcatgaagggatcgcagtggtcaaggaaagtcgttcagaaaaattttcaaaaggggatcgagtagtcgttgttcccaatataccgggacaaatcttgcatcctgagattgatcagaagcccgatattcctgtgaattactcaaagggaaatgcctttttaggaagcggctatgatggtatggcccaaagctgcttggttcatccagaagaatgtctggtgcgtatccctgatgaaattcccaatgaaatcgcggttttagcggagctttcgtctgtttctcatcatgctcttagccacgtgcaggagaagctgaaaaagacagatactcgtgtagccctttttggtgatggacctgtgggatacttcaccgctgttatgctgaaatatctgtacggcgtgactgctgaacgctttgttgtctttggtgcagcggatgataagttggcgcatttcgattttgctcgaagagagaatgtactgtcttatgattttaagcattctaaagaaaagtttgatgtactgatcgaatgcacaggcggaaaatttagtcaaagtgctttgaatcaagcaattgatattgcagattcgttagcggatatcatttttatgggtgtgactgaagagctggtcccaattgatacacgagacattttggaaaaaggaattaccgctcatggcagcagtcgatcgtcaacggcggactttgaagcagttgttgaaggcatgaaaaatccagactatcgacgtgcgttgagtaaaattttgccggagaaaattgttgaggtttcaacaggagaagattttagaagagtgatggagcaatttgtcgaaaatccaggctggaataaaacagttatgcatttcaattggtaagtgcgacgggctaaatgaatgaggtgagaatatgacaggaatagcaattgtaacgcatggcgagatggcgataggtctgatggacagcttgagccttatcatgggagagcaggaagattatcaaacgcttggattaaagcatggggatgacattggcgaattcggagagaagattcaaacggccatttgcgaactggacacaggtgatggggtattggttttcgttgatttattttctgcaagtccctataaccaagcagctatgtccttcaacaaattgaaggggcatcactatcgattaatttcaggggtgaatcttcccatgattgtcgaagcctttaatcagcgaatgattggagcgaatttagaaacaatgtatcaagccgcaatgaccgcgggaaaagacggaatcaaagagtttttggaagaaatggcaaagctggaaaaaatacgtacggataaataatagaaatggagtggagtataaatgggtgaaatcgtattagcacgaatcgatgatcgcttgattcacggacaagtaatgacggcctggctgcagtttactggaggaaatcatattgtcattgtggatgacgcgacagcaggagatgagtttaccaaatcgatcatgtcgatggcggtgccgaatgggattaaattatcgattttgggagtggcagatggaacgaagcttttggcgaatattcctgacggacacaagatcattgtgttggcgaaggagcctcaaacgtattggcagctgattgaaaagggcgtgaccttcgatgagatcattattggtggaatgggagcacggaaagatcgtaaaaccttccataaaaatatttcggcttcggaggaagaaaaggagacctttagaaagatcgtcgcccaaaatgtcaaaatgaagatccatgtgattccagatcagggttcacaagcaattgaaggattgctataaaaaaatagtgaaggaagtggagaaatgaaaattagtctaatccaagcaattttgatcggggtcgtttattatcttggaatcaatggcacgccgtggctttcattagtgggaacgcatggctggatgcgtccgctggtcaatggaactgtagtcggattgattttaggtgatccggttcaggggtgtatcatcggagcggctatcaacctgccatatttagcttttatttcagctggcggaacggtggcgatggacccagcgcttgcggggactcttggaaccgctttagcgatggcggctaaggttgaaccggctgttgctgtgaccttggctgtaccgatcggactgctggggaccttgatttgggtcgctcatatgaccgttgatattacttttgtgcatatggcagataaggctgcagaagaaggaaaaattgaccgcattaattggctgcatattgtaccaccgcaattatttttacttttgattactgtcgttccggttgccttagccgcttatttaggagcagatgcagttgaggggatcgtggatgctttaagcggacgcccgctagatgttctttcagcgattggcggtatactgccagctctggggattgccatgaacctgcgtgcgatgaatggtaaaggaactttattatttttcactttcggctttatgctagcaatctactccggactgccttctgtaccgatcgctgtttttgcaggaatcatcggctatgtctttacggagttgtatttgaaagataaaaatggagggctgacataatggagcagacagcagtagaagctaaagaaaagctattaacaaaaaaagatgtagttaaagccttttggcgttggacatttttctcgcatgcaaattacaactatgagcggttacaggcaactggagttgttcatgcctttagtccgattttgaaaaagctgtatggcaaagatgaagacgaaatgaaatcagcactagagcgtcacatgcagttttttaataccgagccatcttttggcggtccgattttagccatgacgattgcgatggaagaagaacgagcattgggagcagacattaatgatcaaacgatcaatggattgaaaacaggattaatgggtcccttagcggggattggcgataccttatggcaaggaaccttgataccaattctgctctcctttacgctgccatttggtgcgaagggaaatatttttatgggacctgtcctattctttgccctccattggatcattatgactgtcattgcctacttcttatggattcaaggctatgagcaaggaaaagaaggcatccagaagatgatggcaggcggacgcctttcctatatcatgaccttctcgcaaacattgggggcgatcgtgatcggttcgctggcagccaattttgttaaaatcgccaccccattaagtatacatttgagcgggaaagaaaatctgtcgattcaaaccgatgtgctagatgcattggtcaaaggcatcttgccgttgggtgtgactttgttgacctattatttattgaagcataaaaaatataccccgacaaaggtattagttattcaaattgtgggcggtgcgattttagccgcgattggtttgattgtgaactcaatataagtgaatcaacgacgtcaactaaaaacaagggaaactttgtttttagttgacgtcgtttttgctttatttaagaagaataaaagcatatttaacacgagaaaaagcagtatttcatgtaattaaaaattttggttctataatattttgtgttggtggaaaatcgaaggcgattttctactaacacttttttcttcgtttcaactcaaaaagagactcacttttggtaaaatttagtcgaccaaaacgtcaccctaccaaaggagtctctcaatggataatcatactagaaaattactcggattaacagataaacatttattttttgatgaagaatggctgattgaaaaagaatataaaggcgttcaagcgcagtttattaaaggaaaattggatgactctccttcctgttgtgaacactgtcgatcggttcgtattatccgcaacggttcctatacgacacgcactcagatgttgaaagtcaaagaaaagttaactattttagaattaaaacgtacccgttttctctgccatgattgtggacggaccttttctgcgaaaacggacttagttgatgaacatcatcaactaacaaaggaactgaagcaggcgattctcatggaactgtacgaaaatcaatcacgtaaactaatcgctaagaagtacttcgtctcggatgggacggtgacacggatcttgcgtgaagcaacgaagcattaccagccacgtatgaacttccttccgacggtgttgtgtatggatgagttcaaatcaatgaagtctgtttctggttccatgagttttatttgtgttgatgggacaaccaatcagctatttacgatccttgaagatcgcagactttacaaactaactcaatacttcctgcgctttcctagaaaggcccgtttaaaggtcaagtacctagtgatggacatgaatgccagctattgtcagttgcttaaaacggtctttccaaatgcggagatcgtaactgaccgctttcatattgtccaacacatcaatcgcagtttcaatcaattacgtgtccagatcatgaatcgttttcgaacctcacactctgaaaatcagaagaagtaccgtcggctcaagcgatattggaaactcttactcaaagattccacgacattggagccactcaaacggcattatcatcgactgtttaaacgaccaattagtcaaacagaaatcgtcgatgaactgttaagctacaacgaagaattgcgaacagcgtatcatttttgtcaattattacgctattatttcgttaaacgagatacggaaggctttcaagaaacccttaaaacaatttcatctacgttacctcagtcgtttaaaaagaaattcacgatcttccatcgctaccaatcgggcatttcaaatgcctttaaagtgtcccactcaaacggtgtcacggaggggctgaataacaagatcaagctgattaaacgaattgcgtttggttatcgcaacttttataactttcgggcacggatctatttacaacaaggtctgatctttgaaaactaaaaaaatatgcggcgcacagaacgcgccgcatatcggactaagttttattcaaatttgtcttcaccaacacgatttgacgaagagccaaaatttttgatggcagagcttctgcaattgacgtgtatctgagaatcgcgaattctagcgggtgtgatttcattcgagggttttgatggattaagttaggaatcattgatattacgaagattggtttattaaatctgatgaaaatagcctttgaagcaactgtaaacatgaatactttttgaatagtcattaatgttgaaaaaaagtgacaaacatacgaacgaacaagaaagaaattgtcatgttcatactggtaaaaaaagtgaaaattgaagggcagggaagttagacccaaagagtctttttgaccgagtatttttaatgtaagagagaggttggtctgataccagtattttttattttgtaaataactaaaatagaaatagtttaattttaagatagattaaataatttaaatttacaaattaaaaatctcttcgagtattgtatttatatttagggtgttttataatttattaactgatagcgattatttttgacttatttctataatgaaataaatcgtaagtaaattatagtagtcactattaacgcttacagctattaaaaaatcatgaaaggtgttagtggttatgagaaacaaattagttgtatttgggttgattgtactgttagttttacaaaccctaagtcctgcttttgcttatgcgcaaggcaccactgaatcaacgacgaattcaacagagcaaaaggagacggtagcttcttcaacaaagccatccgctgcaacgtcagcaccatcgtcttcatcaaataatgaagataaaactgctgaaaaaagcagttcgacggattcagttgaagcgagtaaagcaacagcagaatcagaaagtaaagagcagccgaagaaacaagctcgtgcagcaattactgataatattttcagttcagtaaaaatgtacaaaattaatggagatgaagttcagccgaatgataccctaccgaacatgactgggataaagctggcgttacaattctcttttacaaacaagaattatcaaacaggagataccttcacaacacagcttcctgcacaggtagcgattgctaaagatctatccggcagctttagtccaatgacttcagccgaatggtcgataaacgcagctactaaagaattaacaattactttcttagaagataacgtatcttcagaagtttatgatttaacattggtaacctcacttgagaaagtaacaggtattgatgaggaaaatcaaaaaatcgtttttgataccgcgccgacaccaacaagcttttcaatagaaatgacttcaagtgttgatccaggaaaaaatagtatggcattgacaatggatacgttgaatcctaagaaagctgatttaacgtcagtattcaacttggatcgaacagacaacactgaccggatgtatcgaatcgaagcgtacaataataacagtaaaattagttttgattccgtcaaagtatacgctagtgatgttgactttaatggtaccttggtcggcagtaaaaccttattgaccaaggacgttgattatgaaatcgtctataagaatgccgggacgactcgcgcgacagcagaaattcaattgaaaaattccattgggaaaaaggcgataattgctgaatcagttgtttctgggattgatggaaagaattacgtggatgaatctgttacaggtaatgagtacaactatttctatgcgtattcatatacttacgagaatggcagccaattaaattcttcctctacgtctaaaacgtttgtgactttgcaacctttggaagcgaaagggaaaatcaatcaagaaactggcgccatcgattgggagattaagtataattttaacgagcagcatctaacaagtgcttcacagctgcttacagatttaactgatcaaggtgtggagttcgttgctggttcaatcagtattgaaaaggttggctttaattatactagcggcaacaactatgaggtggtttcccaaggtgacggcgccggtgattttacagtttcgactgataactcaggctcgttagcctttacgcctaagagtaatacgactcaggcatatgtaatcaaatactccaccaaaattactgatccgactgaacggattattaaaaataaggtgactaatggaacggtcacgaaggaagcacaagtgagtcttattccgaatcttttatcaaaagaagcgggaacgatcgatattttcaatcggacgatggagtggaatatcaccgtcaacgctgagaaatatacgatgaaaaaccctgtcgttcatgattactttattggcgcggtcaaggattatactggacttacgatcaataaaaagatttctgacaccgaatctgttccgttagtggaaaatgtcgactacaaaataactcgatttgatgagaatggttcgccagtcggggcacagccgaatgtcaatggcgcaccagatgattttaacggcggtgtgcgaatcgacttccttggtgattacaatgaattaaaggatacactggtcattacaatcaaaactaagattgaaacatccgatcagagaacagaaatcaaaaacaaggcaacgctaaattatggcaatactccaggagttatcgagtatgaggccaaaggaacctttgtcgatccttattacacaggcggagcaaaattagctcaaaatgctagtacgacggggaactatttgtatcaaaattggctggtctttctaaattccactggggcaaaattcaatttaacgaaaatggaagacagcttgcctgctggcacagagctggttccaggatctctgcgttttgaagaggtcacaagccagtcaatgattgataatatgtcacgctatttaacgaatgattataacttggttcaagaaggttcagatgtttatccaacgaagattgatactgagaataatcaaattaatttggagtttggcaatttgggtgctaagcgtgtatatgtgaagtaccggacacggatcaagcgagattggtatgtttatagtcgtttggataatgtggcgaaagtcacctatgacgcgaaggcgccagccgaatataaagccagtctgtatgcatacaattatgaaaatgcgctgctaaaatctgtagcaaaagatccatcaaaagaaaacgtagcgaattggaccgttaccacgagaaatatttcagcagatctgcccgttcaagatcctgtgattacagataccttgacaccaggaacgacgaatgcggcctatgatccaacgtcctttgtggttaccaatacagctactaatgagaaaatcagtacagatcattatagcttgacgattacaggaaatacattcaaaattactttttctgattacaaagccgagagtaatattcaagtgaaatacaatacggtcagtgaattcccagggggagtcaggaacctttcgcaggtaagctctaccagctatggtgcgttgagcacttcttaccgacaagcgaatacatccgtgaatttaagctttactagcggcagcggaactggggtagtgaagaccgccgatctatccgtcttgaaggtaaatgagaaggacgagcctttagcaggtgcaacctttgaaattcttaaagaagacggaacagaaacaggtcttaaagccgataccgacgatactggtgaggtaacctttacgggattaccgttaggcaactacctattgaaggaaagcaaggcaccaaatgggtatgaaatcaatcctgattatgaaaccggcaaagcaatcactttagtcgaagagatggacacgataaaagttgtcaataaagaaaccattccaaacagtatcgaacttactaaaacagatagtcaaacagatgagcctttagctggagcgaaattcaaacttgaaaaggctgatggtgagttagtcagtgaagatcatgaaacagacgcaaatggacagtttaaggtgactggtctgccgaaaggtgactatcaatttgtggaaacagcagcaccagcaggctatcaaaaagatgacactcccgttaagttctcaatcactgaacgccaagggcaagtcgtcaatcttaagaaaactaatacgttagcaccaggagcagtacgattgaccaaaatcgatgatcaatcggaggaaacattgaaaggtgcgattttccaattacaggatagtgatggagagattgtaaaagacaacttggctaccgatgggtacggaattttagaagtaaaagatttagcacccggtgattatcaatttgtcgaaacacaagcaccgactggttatgaaaaagatgcaacaccaattgagttcactattacaaaagctcaagctaaagctgctgaagttgaaaaaaccaatacaaaatcaccagcggagccaggtacagtcacattgactaaaacagatgcgaaaacaggaaaagctttacctgatgcggtctttgaattgcaggacagcaaaggaaaagcaataaaaacagatgttgagttagtgacagacatatctggcaagcttaagtttaaacttgggacgatggctccgggaacctatcaattggtggaaaccgaagccccaacaggctatgaaaaagatgcgacgccggtgaaatttacgattaaagatcaaagcgacacaatcgagctaacaaagaccaacaaagcgattagtggtgtcattttagaaaaagttgatggtgccaccaaccagcctttagctggcgcagaattcattttacaaacacaagcaggaaaaacaattgagactgatgaaaaaatgatcacggatggtaacggccgtttagcggtaaaaggcttagatcccggtgattaccagttggttgaaaccaaagcacctgcaggctataaattggattcaaaaccagtaaccttccaattaacagcgaagaagcagttggttacagtcagaaaagaaaatgtgaaggcgagcggaaaagctggcaatacagtatctacttctactagctatgtccgacgcaaccatacgtacctgcctaaaacaggcgaacaaagatcaactattttgataatcgctggtattatcatagtgttagttgcaggtggcgtaatctacttcaaacgtaaaaaataatttttgaataaatccggttagctaagctgctagccggatttgttttgtccttcgtttcattgtattttatagatactagaaaacatatgaggacggtgtcaagatgggaaatcagtttgtacggatagatgaaaagaattggaaacgagcgatgcattgtcaggtatttagaaatagtgtggaaccggctttttgcgtgacctttgagctggatatcaccaactttctaaacaagattcgtgagaaaaaatattccttcacttttgcgctggtctatagtgtttcagtttgtgccaatcaaattgaagaatttcgctatcgtttcttggatggagatgtggttctttatgatcgaatcgacaccgcttttacttaccttaatcaagacaccgaattgttcaaagtcgtgaatgtgccattaacagaaaaccttgaagagtacatcgtctttgctgctaaaacggcagaagaacagcaggcgtatttcaccggtcctttaggcaatgatgtctatcaattttcgccgatgccgtgggtgagctatacccatatttcacacaccaatgctggtaaaaaggataatgctacgccgttattcgattggggaaaatatttccagcgtgacggtcgcacgttgttgccattctctgttcaagtacatcattcctttgttgatggtctgcatgttggtaaactggcggatactttacaagcatatttggatgctttctaatataatggacagcaaatcaaataattgttggtgaggaagaacaatgatcacgaatattgaagaattgtatgaagcatttagtcaagtcatgacgcataaacgctggtgggacacggataataaatgggaaatcctattaggtgcagtcttggttcagaacactaattggaaaaatgtagactatgcactggaaaatttatatcacacgactcaatttttgccagaaaaagttttggctttagaaaagatccagctacaggatttgattcggccaagtggcttttataaagggaaatcaaatacgatcatcgggttattgacttggttagaagggtatcaatttgacttatcaatggttgcagagaaagatttttctgtgctacgcaaggaattgttggcaatcaagggaatcggtgatgaaacagccgatgctttattggtgtatgtctttgatcagtcgacgtttatcgcggataaatacgcacagcggatgtttgaaaaattcggttttatctctactggctataaacaattgaagagaaagattatttggcccgacgtaatggacacactaaaagcacaaaatctacatggctggatcattcaatacggacagatgtatttaaaaaatgacgagatttggcaaagcggaccgctgaaaaattttaagctcaagttaagcgcgaccaatgcttaacaagtcataaagtctctaagctttcttttaaaagcctttcgtggtataacatgctgtatgttttagttgttaaaaaagtaaccattaataatgaataaggggcaatgaaataaatggtcacattaaaatcaaaacgagaaatcgaccagatgaaagaatcgggcgcgattttagcagggattcatgagcaattacgggagatcatcaaaccagggatcaccacaaaagaaattgatcaatttgttcaagaaaaaatcgaggcggccggagcgacagctgcccaaattggttttgaaggctatgaatttgctacatgtaccagtgtgaatgatgaaatttgtcatgggtttccatcgagttatcggctgaaatcgggcgatgtcctgaaggtggatttttgtgtggattatcatggtgccatctcagatagctgctggacctacgcagtcggtgagattgcaccagagcatcaagcgttaatggatgtgacgaaagaagcgttgatgattggaatcgctcaggcacaagtgggaaatcgagtgggagatatcggtcatgccattcaaacttatgcagaagggaaaggttatggtgtggtacaagattttctagctcatggcattggcccaacgattcatgaagagcctttctttccgcattttggtacagctggcaagggtacacgccttaaggaaggaatgaccattacaatcgagccgatgattactaccggaacctgggaagcgggcattgatggcaatggctggactgcccgtacgttagatggtagtttttgcgcacaatatgagcattccatcgcgattactaaagaaggtcccgttatcatgacagaacaaggggtataattttgaaaaggaggattcgtgagggcgagttctcttttttgttatttagataatttaaatgttttaatttttagaactttgttactgaaaatgttgctatgaattcaaattttttagtcaaaattaaaattaaaggtatttcgctttcctatttacaacacgcttttcgttgttatattatatgattgttgattaatgaaagcgctataaatatggaggggtagacaatgaatgtggcaaaactagctgagagacagttatttctaatgaaagctgagaatttggagaaacgagtacgcgcctactatgctcaaacacaggatgtggattccttgattgagtacggagtcgcgattcttgtgcggagctttttctgcatgggaagctttgcggagctgatccaagacttgattcaagaggtttattttacagttgaaccaactgctgtcatgcgccaatatttgccctattttgaagactatttcaccgaaaacgaatggcaaacaatagtaaatcgcctatttggcaatcatacaacctaccttgcgcaaacggaagaggcgcgtgtaaataaaggctatttagaacaaactgggacactcgataatcggattgagggtcttgtttatcgtgtagaagccgtttttgaagatactattgggaaaaaacacaagttgacgattcgtgataccgactccacttttagtgaatcgcaaacgattcaagtgttgaatatattgacgaccttgagtatttttgacacagctgatgtgcggaaatacgaaacctatgtgagttatcaaacaccgggaaaaatcattgcgacatctcataattcccgtcaaaaaaccaaaccaacagcgaaggaaccggaaaccatcgctgctcaacaagacgctcaacaatcagaaaaagctccgaaaaaaatggtagctgctgcaaaaacgcggtcatctgcagctccagcatctgcagggtctgaaaaagagtcgaataagcccgcaagtaacagtacggccacaaaggaaaaacaatccagtcctgccaatccgccgaaaaataccaacagctcatcaccgaatgtcgaggcgaagaaaaaagccaatgaactgctgcagcaaccagatatgtcctataaacgtgtcagcaaaaatgaagaacagattcaggccaacggaaatagtaaaaagatgaagaacaaaataaataatgcgctggggcggagtaagaaccggaaaaggaacaaaaggaaatagcgatcttgtttagacaagaatgtttatttggcgagccccaataaaagaaagctttcaattgcttttatgagcgacggacaaatatgagtcacgtggcttatttggcgtgtccaaattaattaaacgagattaagtgaagcgtgaaatgtcggagaaggagtctgacgtttcttttttttagacaaatcagccaaatagtctaactttatgaatacaaggaagcgtctcgttttcaattatttttggctattggtaagctgagtttatcaagttgaagggggaaacatcatgagatatacgaatgggaattatgaagcatttgctagaccaagaaaaccggcaggcgtggacgacaagagtgcctatatcgtcggagcaggtctggcaggcttagctgcagctgtttttttaattcgggatggtcaaatgaaaggcgaacacatccatatttttgaagaactttccttatctggcggttcattagatggaaaatttattcctcatgacggctttgtaactcgtggcggacgagaaatggaaaatcactttgaatgcttgtgggatttattccgctcagtgccttcattggaagtagaggatgcttcggttttagatgagttctattggttggatcatgatgatccgaattcatcaaattgccggatcatctacaatcgtggagaacgtgcggaggatgatggtgattttacattgtcgaaaaaagcacaaaaagaattggttgagcttttcatgacttcagaagatcaactgattggtaagaaaatcgaagacgtttttggagaagaattttttgcatcgaacttctggttgtactggtgttcaatgtttgcttttgaaaaatggcattcagcgattgaaatgcgccgctacgtgatgcgtttcattcaccatattaagggcttgccagattttacagcattgaaatttactcgctacaatcaatatgaatcgttagtgaaaccattattggccttcttaaatgaccatggagtagatttccaatatgaaacgaaaattaataatattgaagtcgaagctactcctgataaaaaagtagcgaaaaagattctgttgacacgttcagataaagctgaagagatcgacttaacagaaaatgatttggttttcgttacgaacggatcaatcacggagagctctacagaaggcaatcatcataccccagcaccgattactcatgaattaggcggcagctggaatctttggaaaaacttggcaaaacaatcgaatgaatttggtcaccctgaagttttttgtgacaacctgccagatgaaagctggtttgtttctgccacagtgacttgggaaaactttgatattgaaccgtatatttcacgcttaactcaacgtaaattgcgaactgggaaagtggtaacaggcggaatcattaccatcaaggattcgaattggctgatgagctttgcgacacaccgtcaaccacatttcaaagagcaaagtgatcaacaaacggtgacttgggtctatggtttattatctaatacgcctggaaattacatcaaaaaacctatcgaacaatgcagcgggcaagagatcgttcaagaactgatgtatcatttaggggttccagaagaagacatcaagaaattctctgaagaatcatgcgtggtaacaccagtttatatgccgtttatcacctcgtattttatgttgcgagaacctggtgatcgtccattagtcattccaaatggctcagagaaccttgccttcatcggcaactttgctgaaaccgaacgtgatactgtctttacgacagagtattcagttcgaacagcgatggaagctgtttacacattcttagacatcgaacggggcgtgccagaagtattcgcctcggcctatgatcttcggacgttagccaattcagtctattatttaagtgatcgtaagaagctttcggaaatggatctgccatttgttgagaaaaaagtgttggagcattttgtgaagaaagtggagcatacctatattggcgatgtgttaaaggacaatcatttactgtaggagaaacatcctaagcttaacgaccgaatcatcagtgttcagcgtcaagaaaaaagaaaagtccaaaaatttccttttcaaatttttgttggttttcggtttattttcgcagatgtcgtttatgaatcgatgtatattcgtgaaaaggagctgatctaaaagtcttttagacctttggatcagctcctcctgtttgttatgagattttttctaatgttgctgcttgatttatagtataattctaataaatacattgagggggacaacgaatgatcaaagtagcaattgttggatatggaaatttagggcgcggagtggaacgggcattaaagcaaaatgcggacatggaattagttggtgtttttacaagaagaaatcccgaaaccgttcagacggatggcgcaccagcctttggactagatgagttagacgcacagaagggaaccattgatgtgtgtattttgtgtggtggatcagcaacggatttacctgtccaaacaccggcgatcacgaaaaactttaatacgatcgatagttttgatactcacgcgaagattcctgagcactttacgaatgtcgataaggaagcgaaggaacatcaaactgtttcgattatttccaccggttgggaccccggcttgtttagcttgaatcgtctatacgcgcaaagtattttgccagaaggagagacctatactttttggggcaaaggtgtgagtcaaggacattcggatgccttgagaagaattgtaggggttgcggatgcgatccaatacacgattcctaaaagcgaagtgatcgagaagctaaaagctggcgagaaaatggaattgacgactcgtgacaaacatttacgagaatgctttgttgttttagaggcaggagcagacgctgaggcgatcaagaaagagatcgttacgatgcccaattatttcgatgaatatgatacgatcgttcattttatttcagccgaagaattgaaacgtgatcatcatgcgatgcctcacggcggtacggtgctgcgtacaggtacaactcataaagaaacgaaacaagtgattgagtacaatctgcaattagaaagcaatcctgaatttactgccagcgtactggtcgcatatgccagagcatgcgctcgcttggcaagtgaaaaacaattcggcgcctttacggtattagacattgcaccgaaatacttgtcaccgattgatgatgcaacattgagaaaagatttactataagcagtattaaagcgaagtgatccctactaggctaggtcacttcgcttttttaaatgttgctgattagagaattgcttctcatcatagttgatattcaaggttccattgtagctttctacgatagaacggacagactgcaatccgattccatgagcctgtagttttactttggttcagaagaaacgagtgccagaaggtgggttatccaatccaactattcgattattctgcttttttgtggtaaatttcaggcactaaagcaaccagattgaggtggacgtcatgcgattaacccaagaagaagttctagaaaaaatctataatctgatcttaaatcccaatacgcgcgaatgggaacggtatttgttaacgacagccaaagatggtttagaagctgatacaagcttcaaagagcaagttgcgaagctggaagccgatttgcgcccgttagctcttcggaataatctgactccagacgtgacggatttttatcaggagctcacaggggaggattccattggaataaaagtggaaaagcatgaaattgacgatcccgcctttcaagaacgagcgatttttgcggggggctgtttctggtgtatggtggagcctttcgagacacatccgggcatcgtctcagtattatccggatatactggaggaacgacagagcatcccagctatgaccaagtcagccgtggctacactggtcatgtcgaagcggtcgagattattttcgacacgcgaatcgtcagctatcaagagctgatggaactttattggcaaatcattgatcccaccgatgcgtttgggcaatttcaagatcgaggcgttcaatatcgtccgattatttttaccttgaatgaagaacaacgtgaaattgctgagaaaaagaaactgacagtgatcgagtcaggtgcttataagaaaccgatcattgttgaaatagaagcagcccgcacattttggccggcggaaaattaccatcaagaattctataagaagcagccgaaacgctacaaggccatcaaacgtgcgcgtcagcaattcctgacctatcagcatttaaagggaaaattacgaaccggattcctgcgaagtaaataaaacaaaagaaatttttttaaagtgttgacattcggctaggaagggattatattatatacataccaaccgaatgtatgaaaaggagataccaagatggctcggaataaatacccagaagaaacagtaaataaaattttggatgtttcgatgcaactatttttagaaaaaggctatgaacatacgtcaatccaagatatcgtcaatcatctcggcggtttatcaaaaggagcgatttaccaccatttcaaatcaaaggaagatatcctcgatggcgtgatgaataagctttatcaaaataatgacaacgagttagatcacctgcggctgcttgagaaagattcaagtatgaccggattgcaaaagctgcaggcgctgtttacgacagcgttagaaagtccccgccaggatgacatgtttcaaatggcacctgactttctaaaaaatccccagatgctggcgatgcaaatcgagggaatctataccgaatcggtgccgcactttgttcagccgatcattgaagaaggaatcgcggatggctcgatcaagaccgattatcctaaagaactggcggagatgattctgttattgataaatatctggttgattccattggttcatgatgaagatccaagtagtgtaaccaaccgctttgccctctttcaagaaatgatgggtaaaatgggcattgagatttttgataaggatgcagtcaagcggcttgagaaatttcgcaagatgtacaatcaaaaaaattaatttctgccttctaggcagttttatttaaaagttatacataccgtcgttcggtatttatataatgaatattacttcaacaaataaagcaaataaaaaagaaaaaaaggagtgttttaaaatggaacaaaaaatgaataaaagcaatgtctatggtgtaaatggtgagaatcaaaaacaaagaacaatggtcgaacgaatcggcggagggatcacagtaatcttttcaggaatgttcattttaccaatcctatctgtgctaaccggagctttcggcatcatcgggattggtttaccggcagttgccatgatgaatctttttggtatcctgcatattccattcaatgtactgtttgttcagttgaccggatttccgcaggtgttggttggctttatcgttggtttgatctttgtggctttatctattgtttgcggcaccctgttgaaaaagtatatggctattgccaaacgaatgatctaaaagaggtactgctagaaaagtagaaacaatactttccgatttttatgaatttctgctttgctcatccaataaattgtcgtttcgaaacaatacgttcaatttgaaaataaccatcaattgttgcgtatatttgtgaataggcaaagaggagagtgaatatgaatgtttaaagtgttgttagttttaacgttagtcgggttgttgctatcatccggctctagcaagaaaaaagtaggttagccaattggatatattcttatcgtttgttcaaggagtttgcctaagtgtagtattagcattaattgaaaagatcgaacattcatctaatcattagatgccgtttatttctgaataggagctgatctgaaagtttaaaagacttttggatcagctcttttttctaaactgagtcaaagagttcaattttctatgatgagtattgttattaaaagtgaggattatgcttatccaaatttctcttcacatcgttttagataaaaaaagaaaatgtttatattataaaatttctggatataaagaataaaatacgtaataattgagtatttttccatctgataataaggatatgaatggaggaactaaataaggatacaaaattaacaaaatttacgagaaatcaaaaaaagtctattgatttattaatattaattaattatatgttaatataaaaatatatgtttaaagtgatttgcatattgtaaatctctttttttttcttgaaatgaaaaatataaggacaaataaatcatttagctaattaaaatgtgcttagctgggtaatataattaaatgaaattaatcaattattaatccagttgagaagggagcgagaaatgcaagcgaacgatttgttgatggatgatgaccgttataaatggtacctacttcagtatttggaattaaataaaaatgcctattgttcagttgatcaactcggagatattttagagatttctcgctataaattagaaaaatatctacaggagcttcaggatgagctgaaagaaaatcactatgatgccacgattgagttgcttgaaacaggggagattggggttcagcagctgacacatgcgatcgttaagaaaatgcgcctgtatttagttgagcgaagtcttacttataaaatattccacggctatgtgaccaatgaaaccagtcttgataagcagatcgaagagctccatgtgagtcgctcgagtacctatcgcttatataaacgattgaaggatcaactcgtggaagaaggatttcagctaaagaagaatcaactgatcggagaagaggacacgctccgaaattttttgtttggtctgtattacgaaatttttaatggattagccagcccttttgatgatacgacgcaacatcaagcaaaggaactctttcgctatttggaacattatttaaatctttcattacctaaaacaaaagagcataagctgcaatttttcataagtattgctttggtacgcatgagcaaagcccatctgatggatcgagaatatttggaatatgtagagaatgatgcgacagaatatctgaatagatggttggatagtcatttttcattgacaaatacagaaaaacgacgagaaattgctgccttattactattttgtcagctgatggagattgatttgccactggaaacgacgatcctcgagggtaaagagatgcgaatggcggagaatttagtcgatgaatttttgcagtacttagccagtcactcacgatttgagattaatcaattaaaagaagacaaggaattggtcgctgggttgttgaggatcaatcgaagatggctgatctatcattttcgcgaatcgacttttgtgacaaaaatccaacgtcgctactttcaagaaattaatcctaaactggatgagctgatccaagattttattgagaaagtcgctcatagagggatttttcattcggatcaggaacggaacaagctgtattatgactatttatttttcatgatcacacaaatctctgtcgacgagctagaggaccctgtctttatttgtatcgatttttctcatggcagcagctacaacgaatacattcaaacgatgctgagctccttgcagagcatgaatatttgttatgaagaaaaattgagtaccaagacgcaaatttatttatctgattttttgattgagacacttccttgccatcaaatgatttggaaacgtccaccgacaccagaagattggtccgagtttggacatctattattaacggttaaaggaggagcctatgaatagaaatttattgatcgcacttacacttccttcattaatgttctatcaatcgaatgcgccgattttatatagcagcgagaaattgattgctcaagtaaaagaagaacaagcaatacttggattcgacctgtctgagtctggaaataccttgattatttcgaatgatcaactacaagaaggcgatgaaactgttaatgaggcccgtccaccggatcagtcggaagaaaatgatccaaaaaagcaaacaacaatgaaatctaaagacagaaaaactcttcccaaaacaaagaaacaagtgactgaagagtcatcaaataggaagaaaacggctgctttggaagccattgaacaaaagattagtgcattaccatttacagagttgccagatgataaaactggcgaacgagaacttgtccggatgttggcaaatatgtccggaacaatcatgtacggtaccaaaatgacagaaaccaatcgagaagaatatattacgttttaaaggggatgaaaacagatgaatcgattaaaaaaaatatggtcactatctgcaatagttgggatgctgatcagtagctttccactgtcgattttcgcagagactattgaatcagctgaggtggtgattaatcaagcactgattaccgatacgactgatcaagagattacagaaaccaatcgagtgaagcacaaagctgcagtaaagctcaaattagattggtcattagcgaaggctacactaattgaagagaatacaatcgtaacagtcaacttgccagcaaatctaaattttccagatcaatcaggcagtttagccgatggaatgggaaattaccaagtaagaaatcaacaactgctatttcagcttgctaaaaattacgaagaaacggaagacggacgagcaccggaatttaccagcgcaaaattttatgaagggattttagagttgaatgctgaaactacatctgaagatttagaaatagaaccgatcaatttcggagataatattgtttcaaccatctactatgataaaaaagtagaccctactgctgatcctgttattaaaactgaaatcaacgaaacgaattcttcagcagttaaacaaactcgaacacataataataatctaaatgagagaaatgtaaaactattcgatagtatttctataacggatagagatggcaacccatttaccgctgagaatccagcaaaatataatgacaatattaagattcatattgattggtctttactagattcggtggacattgttagcggtgattactacgagtataaacttccagaaagttttgcggtgcataaccctgtttctgaaatacttaaaaatgatggtcaagaattaggaaccttccatttagacacttctggtaatttgaagattgtctttaatgaaaatgcagggaatcgctctaatcgcaaaggcgaaattaatttaagcacttctcttgatgtgaaaagcatagataaagaaatagaaatcaaaacagaaatttatgatgatcaaaacaaagagattacgatcgttgtaccgatttttcaaatggatatctcaaaagctggtagaatcgacagcaatgcaacagtgacctgggagatagatttcaataaagacggtaagagtttgacgaatgttgtagtaactgatccgatgccggaagggctagggtatatcgcttctaaggggtatatcttcaaagatggtaaatgggaagaaacggccaacttatatacgtataattcagttgctcagacctttacctttaatgatccgatcacaactccagttaaaatctcaatcaatgcatatgtcgatcaaaagaaaacaaatcttgaaacgtataccaatactgctaagattactggaaatgagttcttggaaaaggatgcatcagctaccgtaagttttaaggaagtagataattacaaacgatttatcagctatgatcctcaaacaggcgaggcatcatgggaagtatctgcttctttcacaaaagccgatggtcttataacagataggacgtatgagggaaaaaatgctgaaggcgcactccattatcttgtagaagacagtattgaggtgaaaaataaacaagacggttcttctataaataaggacaaatgggaacttaaaagtacaaccaaacatagttcaggaaatacagttggttttgaaattaagtttaaagaagcgggaagctatttaatcacctataaaaccaaaatggctaatcctatcatgtcagacacgagaatcaacaactatatgactgttgatgatgacggaaataaaaatgataatagtgctggcggtacggttagtccagagacgggaattggagtggataaagctgccgatggtaacaataaagatgtagacaaaatgattcttgcatggagtgctgagataaataaagctggcataacaattgataaccttgttgttactgatttatatgaaatggccaatggtggtaatgtcagtgctttaactttaataaaagatgaactagtgattaaaacggtttctggcacgctgttggttgacggaaatgattatgaggtcgaaatcttaacaagagcaataccaggaacttcggaaataatggaatctggatttaagattactttcaaaaagactattaccgaaaaattaatgatgacctacaaaacgaagtttgatattaacaaacaaaatgagttgaaagagtcaggtagttttccttcaatggctggaaatcgctttagcaacatcttatttgctgagtataaagatgaaaatgggatatctcataaagcaggcgatcaagccgagcaatggatcagtaataattggttgaaaaatgctgataaaggtggtttctttgttggagaaggtgaagatgtccatgaagccatgaaaaaattccttaagaaaaacaatttgaactttacgaatatttttgaagagactgaagcacctgaagatagtgtttattggattgctaaatttaatctctttaagaataagattccagcaaattataaaatcattgatactttaggcgaagggcaagtccttaggaaactgacaatatatgaaacgacgctgaatcgtgatggtgatcttacagaaagttacggaaaaaaattagaagtagggatagattacaactatgaagttgtaaacggtgatatcgttattacacttcttaaggaaacggacaagacattatcaattgccgttgcagtggatgcagatgaagatttttacagatacaagaattatgcagaattgcaaaatgataaaagtgaaaaaatcgtctctgctgatgcagaagtacttgtttctgaaaaggattattggttaaccaaagaggggcttcaaaataatcgtttggttgattggcaagtaataatcaataaagattctaagaagattcataacgccacaattatggatactgtaaaactaaatcaacaaacatttatcttggatgaaaaaaatcaagtagtcgtaaaggtttatgaagcaatcaaaaatggaaacaactttgataaaggatcagaagtcatatttcctgaaggaaagggcgcgtcacttttgactgattcagttgaaggaactcaaagcctaaaaatagagtttgacgaatacattataaagccttacattatcgagtaccaaacaaagctagatccgggaataatgaatagtgagaaaattacaaatgatgtaaaacttagcggtggcacaacagaaattcatcaagtaaccgaggaagtaattgtaaaatcaactgacggttctggtacttcaagtggtgtaaatggtgcgctgattattcataaaattgatagtgatgacaagacttctattaatgaatcaacctttttcaatatctatcgtaaaaacagtgaaaataactatgaaatatttattccaaatctagaagtgaagaacaataaaattgtagctggcgatggaaagttgattgatcaattaagtaatttacgttatggcgcatacgctattcaggaagagagtgctccagatggttatattaaggacgataaattatatgaatttacaattgattccaaagaacaaacctatacattcattttagaaaacaaaaaggaagtaaaagaaccagcgataatcaagttaaaagcagaaaaaacattggaaggtcgcgcgttgagagatcaagatttcagcttcacgttgaaaggtgacggcggcgttgaccaaacaaagaaaaacgataaagacggcaaagtattattcgatgccatcacgtatgacacagctggaacgtatgaatatacgatttctgaaaaaattccagcagctaaagaaacgggtatcacttacgatgatacgaaatataaagtaacggtaacagtggaagaaaaggctgggaaattaggggcaacagccgtttacgaaaatatcaaagccggcgaagtcccaatgtttaagaatacctacaaaccactaccgggaacgattcaattagaagcgaaaaaggatttaagtggtcgcccactaaaagccgacgagttcagcttcacattaaagggcgacggtggtgttgaccaaacgaagaagaatgctaaagatggtaaagtattattcgatgctatcaagtatgaccaagcgggaacgtatgagtacacgatctcagaagttgttcccgacgcactggaaactggaatgacttatgacaccaagaaatatgaagtaacagtcaaagtagtagaaaaagataataagctagaagcaacagcaacatacaaagatgttactgtaggcgaagttccaacctttaaaaatacgtacaatgcactaccaggaacgattcaattagaagcgaagaaagaactaagcggtcgtacactacaagcggatgagttcagcttcacgttgaaaggcgacggcggcgttgaccaaacgaagaagaatgctaaagatggtaaagtattattcgatgctatcacgtatgaccaagcgggaacgtatgaatacacgatctctgaaaaaattccagcagccaaagaaacaggtgtcacttacgatgatacgaaatataaagtaaccgtaacagtagaagaaacgactggaaaattagaagcgacagccgtttacgaaaccggcgaagttccaactttcaaaaatgcctacaaagcactgccaggaagtatccagttagaagcgaagaaggaattagacggtcgttcactaaaagctgacgaattcagcttcaacctaaaaggtgataacgttgaccaaatgaagaaaaataatgctgatggcaaaatcctattcgatcaaattgattacgacaaagccggaacctatgagtatacgatttctgagatgattccagcggacaaagaaacaggtctgacttatgatgaagcagtttataaagtaactgtaactgtcgtggaagaagctggaaaattaaaagcaaaagtggattacgaaagccttgaagccggagaaattccaactttcaaaaatgcctacaaagcactgccaggaagtatccagttagaagcgaagaaggaattagacggtcgttcactaaaagctgacgaattcagcttcaacctaaaaggtgataacgttgaccaaatgaagaaaaataatgctgatggcaaaatcctattcgatcaaattgattacgacaaagccggaacctatgagtatacgatttctgagatgattccagcggacaaagaaacaggtctgacttatgatgaagcagtttataaagtaactgtaactgtcgtggaagaagctggaaaattaaaagcaaaagtggattacgaaagccttgaagccggagaaattccaaccttcaaaaatgtgtacaaagcactaccaggaagtatccagttagaagcgaagaaggaattagatggacgttcactaaaagctgacgaattcagcttcaacctaaaaggtgataacgttgaccaaacaaagaaaaatgctgccgatggtaaagttacctttgatgaaatcacttatgacaaagctggaacctacgagtatacaatctcagaggcgattccaacagacaaagaaacaggtgtcacatacgatgatacgaaatataaagtaaccgtaatagtaaaagaaaaggctggaatgttggaagctgcagccacttacgaaaaccttgaagctggcgagctgccaatctttagaaatctgtatacgccagaaaaggaagtgccaactggcgagctgctattaaagaaaatcgatagtaaaactggccgaacgttagccaacgccgaatttaagttagtagatgacaaaggacaggttgtagctggaaaagaaaaaattgttactggagaagatggctcgattttcattaaaggattggctgatggtgaatatcaaatcatcgaaactaaagcaccggatggctatctgatcgatgagacgccaataaaattctcagtaaaaaataatcagccaagcaaaaaagagatcaatcaagaaaatgatcctcttaaattacctgagaccggcaattctagcaataaaaacaccaatgttcaaacaacgtatcgaaatgctacaggaaagagaaccacagtttcaaaacgattaccatcaacaggaagtattcaaagtaaaggcttagttattttaggtctgttcttcttagcgatgtttggcttagtcgtatttgggaaacggaaaaatatttagcagaaaagaggaagccatgaaaactaacggagaaccaagttggatttcggaattaaatgatgaagaacttgaatttattaaattttttgttctttcctctggatcaattaaaaagctgtctaatatctactctaccagctatccaacgctaagaaagcaactggataaattgattcaaaaaatccgaatcagcgaacgcaaaggaaacgataagatcattcaattgattcatcagttagaaaaagaaggaaaaatcgatcaagacattgcgaatactgtcgtgcaagaatacggcagatcattaaactgtttgatcggtgagtaacagtaaggctttggaacatttcatctgctgaaatgttccaaagctttttttacagaaatcgtctttctctttgtcaaataattaaggtatgatgtgaaggtgtataagtcaaatttatgggaggcagatgggtgtttgttcatgaacttaaattaactgattttcctaaaaagatcgtttatccatttgatgtttttgcggttcaagaaatttttcgcaaagggagtctaagctttgaacaaccggttacttttctatctggagacaatgggacggggaaatccaccattctagaagcgattgcggttgcctatggaattaatccggaaggcggcagtcagaactttaattttcaaactgtggagagtcactctgaattacatgagtcagtgcgtttggtcagaaaggggaatcttcctaagacaaaatttttccttcgttcggagacttattacaatgttgcctctgaattggaatacatggcaaaagatgatggcgaagttgcttttgcctcctatggtggaaagtctctacacacccgctctcatggagaaggactgttgtcgatcattgaaaatcgtttcggtaaggaaggcttttatctgttagatgagccggaagcaggtcttgcgacgagtcgacaatatacgttgctgcgagaaattcaccgcctagttgagacaggaagtcaactgattatcgccacccattctccgattctgatggcctatcctgctgcaacgatttatcagttctcagaagccggactggagcaactaccgttagaagagacccttgcttataaagaaacgaagcttttttacgacgatcataagcgtatgttgcattatttgttggattgattcaggggttttcctttttctagttcacaatgccagtgttagaataattctagctagaaattgggagatggaaaatttgcgctacttaaaaaaatacggcttctattttttactcatcgcggtaatcgctgattttttgacaccgtacgtcttaggaagattttacccaaagctcaatcaattgactgctgtaatcagcctgtttggggatatagatagtccagttcgaagtgctttcttgatttggtcagtagttgctggtagtttttatacgctatcgttgccagcaatctatgcagctttgaaagaaacttcgaagggactagctagtttagctaccgcagcgatcgggctgtatggtattggtgattgtatttttactggcttgtttagtgtcgattctgttgaagctcagtgggatttctcgacttgggtgcacaatatcggctcagggatcggttatactggctttttgctgtttcctttaatcttatattggatttacaaaaaacagaacaatccttacgaaagccggcgctatttaaaattatttgttttaagtgtaacaattgctgcgatgtatggactggctcgtatcccgcaattgaatcaattcatcatttttcagcagctaggattttggcagagactcagttttgtttttaattatttgccgattgttctttttacttggagccaaattaaaaatcctgtaaaccgatgagcattagctgctgtgtttacaggatttttctatttgattttataatctttgcaaaatacttccaacataaaatttatttgacttaagccagactcttcctagttcgataatcgaatcatcttctagatgaaccaattgttcttgataaagtaatggagaattttcttctatatgaagtagttcggaaattgtcttagtagatggaacagccgcaaaagaagtttcactataagccaccttatgttcactgtatttttcaactatattaaaaagactttcgtgagcataatctgcagtatcgatattgggcgctaattggatattaatattattttgaatgaacatgaccacttcatcatgcaccgttcgtgttcgctcaataaaaagatagtcgtcgccaacattgatttttagctgctcagcaattttttcatctgccttctttttttctaaattgattaattctgtctcaaaatcaatgccttggcttttcattgattcagagaaagagatcaaaccttctgctaaaggaaagctgatgttttcgtcaatgacaaaggtacctttgccttgcttttgagttaaaaccttttcttctaccagtaatgagatagccttcttgatcgtaccgcgacttacatcgaaaagttccatgagatctttttctgtagaaattttatctccctttttccattcgcctttttcaattttcttcttaatataatccatcacttgttcgtaaattggtactaatgaattcttatcgatttccataaaatcaaattctcctaacccttagtcgaaaagttcttgatatcattatatccaattttacatgcgatatgtagggataatttctttgaaatggaactaaatgacattcgttctttctcgatagctatgatctattcgggaaaattacgttcttatgatagaaacaagatcgccaacattaatagttggaagaggtttctgctcaacatgaatagttcctggcagctcgcttattgcagcaccatcgaaattgacagtaatatgaccaagctgccgtagattttcttctgcaactttccctacagcagttattgcatatctttcattgttaaagcaaagaaccatatcaggaacaattctttcctgaattggcgtaaccataattttatagcaaaaatcactaagttcaggcggcgcttcttcgccgaaaaatagcagcatgttctcctgtttaaattcttccgcattctgcccaatcgcaattaccgtagtttcaaagattttcattgttattcctcctattattttttgaaatcctgttgacaaatgaaagcgttcctattactataccattatagacgtttatatatgtatagtaacaaatcgctttcggcaccgtcaagtaaaggaggacattctagctttaaagaaggatcaattaattagagaaaggaagatttattatggattttttgattaacatcgcagaacactttactggtttgtttcaagcgggagcagatcaattcacttcatttgttggaggaatgatcccgttgattgcttgtctgattctttttgttaacgctcttattcaatttatcggcgaagatcgagtctttggttttatgaagaagatgactcgtttcacacttttgagatacaccgttattcctttcttggcttgtttctttctaacgaacccaatgtgttatacctttggaacctttttagaagaagaatacaaggcagggttctatgattcaactgtttcaatgttgcatccgatcactggtttgtttccacatgccaattcctcagaactattcgtttggctaggggtatcaggcgggtttgcatcagtcggaaatcaaagtgatttggccattcgtttcttattaacaggttttgtcatttgtctgattcgaggcattgtaactgagcaattagccaaacgcttcgcagccagaagaacagcggaagtttcttaaaatagaaattcagcaggaatgaaaagagaactggggaggaaaaaacatgttcaatacgataaagatttctcatggtaatggcggctggggcggacctttagttgtaacgcctacagctgaaaagaaatatgtgatcagtgtgacgacaggcggaatcaatccagtagcagaacgtatcgccgaattatctggagcgacggtaattgatcaatttactaatccgattgataccaaggaagcattttgtgcagtaattgactgcgcaggcattgctcgttgtggaacatatccaaaattaggaattccgacagtaaatgtaaaattaggttcaccttctggtccgttagcaaaatatattacggaggatatttttgtttcaggagtaacgccaacgagtattactttagctgctgaaggagaagaagcaactattaatcagacaagtactgaaaaggaaaatgcaggagccaagaagagcatcacgaaagaagcacgtgaaaagtacgagtcgaataaaacaaaaagcaatggcatgatggatgctatcaacaaagtaggggtaaccgttggaaatgtaatcaacgtcatctatcaagccgcacgagatactgttgatacaattattcgaaatatcattcctttcatgctgtttgtatctgttctaatcgggattattaactacacaggttttgcggatgtcattgcaaacttattatccccattagctggcagtatttggggtctgatcgcgatcggtctgttttgtagtatcccattcctttcgccgttgatttgtccaggagcaatcatcgcgtcagtgatcagtctattaatcgggaatcaaattgcttcgggaacgattccggcacattatgctttaccggcgttgtatgcggtgaattgccaggtgggttctgattttgctccagttggcctgacattaatggaagcaaaacctgaaaccattgaaaatggtgtgccagcctttctgattgggaaattattgacaggaccattggcaattgtgattgcttactttgcttcatttggtctatagaggataggagcgagagtgatggatgaaataaagattttatttgtgataattctagtctggttgctaggaacgatctcttcttattttcattggaaaaaagtcaacggcaagcttagtgaattgaagcagaattttactggttatttaggaactggaataagcaaagtcaactttttcagaaaagtaatggtcattatcgttgcagactttgatgggaaaattacagattgtcagtatttatatgggtggacaaccttttctaactttagacaaaaatctgagctggttggctgtggcgtggattcagtcttggagaaagcgaacggagacaagttctatgatgcgctgaaattatctctaaacaaaattcaagaacaacgaggctaagtcaatgaaagacgttaacgcagaatactatattggaatcgatatcggtactacttcaatcaagacagtagtctacgatgaaagattcaacatctgctttcatgttggtaagagatacaactataccgcaaccgaagacggctggagggaaattgatccgactatttggtcaacgatcgttcttgaacaattagcagaaattttttccatttttccgtaccagaaaatagaagcgatcggcgttaccggacagatgcatacaaccgtattcttagatcaagcgcagcagccagtgcgaccagccatcatgtggaatgatgagcgaacaattgatgtggtaaagaaaatcaaaacggaattaccgaaaaattcgcaaactgaaaatattttagctattgtctcaacaggcagtcctttagccaatcttatttggctgaagcaatttgagccagaacattacgaacgtttagggaaaatcttgatagccaaggattatgttcgcctgattcttactggggagctgtttacagattattgtgatgcatcaaccagcagtttatataatgtgactactgaacaatggtctgaagaggttttatccacattccagctttccgaaaaaatactgccagaggttggctatgcttctagtcgtgcgggcaccctggatctatctttgttcgatattgaaggaaagaaaggaattcctgtagtagttggaactggggataatgtcgcttcggcgatcgcaaatcaaaaccaacaggtccagcagccgattatttctttaggaacatcaggagtagtaatcctatcaaacagatgtaatgagcggttgaccaccgggaaaaatatactagctaaaatcgccaaagaagaccagcgggttatcacgcaaggagcattgcaaagcggtgcgaaagtgatcgagtggtggtcagagaacatcattcagcaagatattactcaatttgaagcaaggctaacaactaaactaggtgagaaccaagtgattttctttccctatctgaacggggataaaaccttgtttaaagagagcaaactctccggagcattctttggcattgatttaaatagcgaacaagatgatttttcattggcagtttatgaaggaaccgcctttgcaatcaagagattgatgcagcaaatgcggccgttgcaaaaaaatgataaatgcctgctgattggcggcggcgctaaaagtcagctttggccgcaaatatttgccaatgttttaaattgtgtaatccagatcaattgtactgcccgcgaagccaattgtggtgcggcaatgctggcttattatcactgtcaccaacggtatcccgttctaccaaatgagctgcgggaatatgaaccagaagaaatattagtaaaaaaatatcagaacaactatcaagcatttatcacttattcagatgcgttgattaaaaaggaaaggagcgaaaatgatgaagcgtgaagcaataactcctccctttttcacagttagccctaagtcttatttagtaggtaatgagctgctagaattagcaaagttgaccgatcagtatgcaaaggaacatgaatctacgattttttttgttgcaccggctacagaattggtaaatattgttcagaatacggaacacgtcattgtaactgcacaaacggcggatgctaacggattaggaagaggaatggggaggacaatcttggaatccctcaaagaaaatggtgtacaagcgacattcttaaatcacatggaacatcaattaacaataaaagaattaagcacaacaatcatacgtgccaaagaattagggatcattactattgtatgtgcagacacaccagatgaagcagctgcagtggcaatgcttgatccggatattgtgctctgtgaaccgaatcatttagtagggacaggaacattgagcgatgagaaatatattgcagatacaatggcggctgtaagaaaagtaaatccagatattttaatcatggaaggggctggaattacttgtggggcagatgttcgtcgcttgattcgtttaggagcacaaggtacggggatatctagcactttggcattagccgagaataaagcggagctgctatctgatttattaggagcgttgagatgaaaaaggagtgtgaaaaggaatgccattagtcaacggaaatttattagttgaattcattcaggaacaacaagtagtgggcggtgcctttaatacaaccaatttggaaacaacagtaggtatcttggaggctgttgaagaaaccaaaattccaagtttcatccaaattgctccttctaatattggattagccggctatgaaggcattgtggaaatggttaagcgccaagctcgcttcatggatacaccagtagcgctgcatttggaccatgggaaaaaactgacggattttaaagcggcggtacgtgctggatttaattcagtaatgattgatggtgcagagtttgattttgaagaaaatattcgttataccaaagcagccgtcgattttgcgaaagcctatggcgttccggtggaagccgaattaggtgcgattaagggaaaagaagatgatcatgtcagcgaagcggattgcaaaacagatccgaagcaggtgaaagagtttgtggaacgaacgggctgtgatctattggcggtttctgtggggaatgttcatggaatagatgaagaaccgcagattgattttgacttattagcaaaaattgctgaagaatcggctgttcctttagtgattcatggcgggtccgggatttcttcaagtgatttaaaacgaatgaaaagctacaatgtagtcaaaataaatgtagcaagtgaattacgccaaagttatattcagagtattggccatgcctatgatagcaatcctgctgaggctaatttgatcgctgttttgacaaatgcaaaaaactcggttcagaaaaaaactgtagaaaaaatcaaagaactaaatagataactactacgaataacgagtcaacaaatggtcgatgtttgttggcttcttttgtgagctaggctgcttaatttatttattgaattttagcggaaaatctctctattttgactaaaaatatttgtgttaccgtttctctacctatatgatggagaaaggaacagctaaaaaaactattaatagcatagtgggggagtcaaaatgaaaaaggtaaaattggttatggtaacagcattagcattagtgctttttgctgggtgtaaacagaagccgcaagaggagtttactgcagaattagcgaaacaaagcgaaatgaatgccggtagctattcgatcgtaattgataaaatgacgatttcgggtgagggtgaagacgcacggactcgcgcttctatggatttaggagcaaaaatgatcagcgggactaaaatttcaggcgattatcttaaagatagcgagaaaaaacgaatcgcgatggacatgaacattgatgttttaggtcagaagattccgatggatttctttatggatcagaagaaaaaatcaatgtacttaagtactgattttatgacggaaacagtgaatatcatgaaggaattcaatgcagagatggcttttgatgcgaaggaaattgaaaagctaaaaggcaaatacgtccaaatgactgaagaggatatgaagaagaacgctaataacaagacggatacaagtttagcatatgaaaactttgattgggagttcttagggaattatcttaatacgttagactctgattcttttgagaaaaaagatgatacaatcaaacggacctttacgaagaaggatatcaaaggctatattgactacgccaaagaaaatggaagtaaagaagagaagaaggctgtcaaagagctggaaaaaaatcttgatgatctgactaaatatgaacaaacaacgaccttgaatacgaaaaagcacacacaaaagaccaaaatgaaaatcgctgcgaaaaacgatgatagtacagtttcgatggacttgacgatgaacagtcaagccaaagactctaagaaaaaaattacattgccaaaatcagcagatacaatctcaatggaagagttccaaaaaatcttagatgatgctcagaagaatgagtcattggtttcggaagaagagttcaatgaattgttggatgccattaagcaagggcgtggtcaatttacgcaagcacaaattgatcaaatcaagagtacctacaaaccatacttaacggaagaacaatttaagcagcttgaggaagcactggatcaatcaatcgaaacagcagcgtaaattagctgacggactgagttgtaataaaacaactgattatgctaaacttattatgacgacaatcacaaaaaatagatgagaggcgattttggtccggcgcactattcattccgtaattaaaggattttagtgaaacgtggaaaagtattctgacaatgaataaactgaaaattttcggatgaaaagacagtttatttgttgtgcagaaatttttcacgtttttttgttgtctgttggattgtcgtcagtgagaaagaggaaaaaaaatgatggaatatattaaacaggatgtcccgatttttagtcacagcaaggattcaatttggttagatgcgcatttagcgcctcaaatgttggcggcccacttggataccgaatttgatggagccacgagaaatgcggaatatataaatcaatctatggcgtggttgacacaaaaatgtccggcacagtcgtttcctaagctgctggatctgggttgcggtcctgggatttatgctgaaaaattttatgaggcaggttatcaggtcaaagggatcgatttttctaaattgagtattgctcatgctgcgaagtcagctgaagaaaagcaatacgtcattgattatcaatgcggggactacttgaaagaggatttagggagcgaggcctatgatcttatcgtcttgatctattgtgatttgggtgttttttcaccagaggatcgaaagcgcgtatttcaaaaggtttatgctgcgctaaaaaaaggtggaagattcatttttgatgtcttcactccgaagaaatatgcggacttcgaagcggcgagaacttggcagctggagaaaaataatttttggacgcaggaaacgtgtgtacacttaacagcacagaaaaattactctggaaccaatacctatttggatcagcattatttgctttatccagataagatcaaagaatttttcatttgggaaacggtctttgaacaagaacaactgcttatggaattaagcactataggttttgaaagcagtgaagtttttggagatattcgtggaatgaaagctacagaggattcagaaacgatttgtttcgttgttgaaaaataaaaaaggggcagtttctgaattgttagaaactgcctttttgagtattaatgaagaagaaaggaaagcatgaaaccagcaagatcaaacaggtaatgaacggcaaagctggtaagaatagagtttgactgttcataactgcgattaaaccaaaatctggcagaaccttgaagcgcaatcacttgaaggatcgttaataggatagccccattgaaataggtccagtaatgaattagaccgaatatgatgctaacaaggatatttgctactaaaggtgaagcttttaatttgaataagtcatagaaataaatactgaatagttcttcgcctatcaaggcaaagggcataattaaaaagaaaaaccaaattggattatctgctgctggatttcctttgtgggtgtgagtaatcgcaacaatcaatatccctaaaacaaaagagaaaagctgggcgatgaggaaatacttgataaaattcttccagaattgaactggtttttgataaagcttttcgtatgctttaaagccaaaaacaaggcaataggcgatcgtgccaaaaatcaaaagagaaaaatagccgatatagggaatagagataaagtgatttacattgctaacgagatagaaaacaagtccgacgagcagcgtggcgacgatgatcttagaataattcaatggtctagtcatttttttcctcctaaggaagcttcgttacggttcgtttttttgaacaaaattagcgttaacaataaaagaattacgcctgaaattgtaaaaaatagggtttgccgccttgatgatcccgttttaggcagtaattttttatcagagaatacctgtgtttctgattggattgactggctctcttttgtcctttcagtggaagcaacttgcgatttttccgttgttgcggctgggctagtttgttcggagccagcggctgattctttttttggttcagtcgcttttttttcattatttatcacttgcttagcaggtgactcgtcactactttgtggttccttttcgagcgcagatgtttctgaattatgctgtttatcagtaaaatcatccttgattgattcaggtgtatttgttttctgatcaattatttgtacgcttgatgaggtagttgttgtcggtgcctccgttgttgtctcagtgacaggtatgctttcagggattgtcgttggttcggtatagggttctggaaccacttcgccgccatcactataccaatggttgccgtcacgataaagcgttaaacttccgttatcattatgaaggaataaacgattctcatcattggaactatcggtttcgtaaagtgtcccattgactaaatatttttgtgaagaaaaattagctgattcatttgtattcccgaatgcgtgaaacggaaagacgacgattgtcgagagtgtaagtccgaatccaatagcgattttttgtttaatagttttcatttcaaaatcctttcctgttgttttgatacttgttagttgtatcacagaaaaatggatttttttaaataggtcttatatactggaccagatttttataaaagtgattcaagttctttagcaaggggtgcataatcgagctcatgaagaatctttaagaccatctcactttctgtttgtccgttcgcgtcgccgcgttttgtcagcaaaacccctttgaaaaatttggcacacagtcgatgaaagcactctttgtactcggtacttaaaagcaaaagctgttcaattaatacttccgcatagtctaataggttttcatcaagcgtttcccgaattaagttgactaaaagactgcagaaaatctctctgccgcgatcataatttttgtatagttctaaagattttgagagctgcttgaagaagagcaactgtttttcaccttcaataaattccaaggtgttggcaaataattggatttcctgcagtgtccacgtttgcagatttgtcaggtactgaataatcgttgccttatcttctgacaaaacgacatcaggtgtatagctgcctgttttgttcgtcgcttcgatgatccgaatccgagaacgaacttccgcaacatggacattcgcgatcggtccttgttgctcttgtagctcctgcagaagctgataaagagctggaagatcatagttgttactgtaattggagtaacgaaaaatataatcggcttgctcattcaagcggtaatcctgactaatatagagaaactcgtccatatctaaggaaagtcgctccaaaatatctagcagcaaggtcgctgaaatactatgattccccttttcaaattcaatggcgtaggattttgaaacaatgccgagataaacctctttttgagttaagcctttacttagccgaattttccgaaccacttctccatgatacatcgcttcaccagctctctatttattgccgttagcatagcatatttcagttaaaaactgtttttaaatgtttgcgaggaatgtcgagttccttttcgtttcttgctataataattgaaaaacgaggtggcgcatgaaaacgattggattattaggcgggatgagctgggaaagcacggtaacgtattacacacgaatcaacgaattaatgaatcagcaattaggtgggctgcattcggctaaaattaaactagccagtgttgattttgaagaaattgaaaactatcaggcagcaaatgaatgggaaaaaagcggagcggttctcggaaaagaagcgcagcaattagagcaagcaggggctgattttctactaatctgcaccaacacgatgcacaaggtcgcaccacagattgctgaatatttaacgattccgatcctgcatattgcagatgctacgattgccgaactacaagcgcagcaaatcaaaaaggtcgccttattagggacgaaatatacgatgactcaagctttttacaaacagaaaattatcgacagcgggatcgatgtatggattcccaacgaagccacgattgaaacaatcaatcaaatcatttttgctgaattgtgtcatggaaagattttaacggaatcaaaagagaaatttatcgaggtgattgaagaagcaatcaaatccggagcggaaggcgtcatcttaggctgcacggaaattggattgttgatccaacaggcggatgttgcgatcccagtttttgatacaactgaaatccattcccaaaaagccgtcgaacaagccttgcagaatagatgaggactgtgatgaaaacgattctttttgccccagcgacctttaatttagcggagaccactcggatgatcgagattgccaagcggatgagcaagaagtatcactgcgttttttgcgggttttcaaaaacgtatgtcaaattgattaaagaggcagagtttgaggttactttgttgagccccacactgacaccacagcaagaagccgcgattattaaatttgatcaaggaaaaagcttgaagaatccctttacggcagaaattgtggttgatcgagtcgctagtgagttagctttgattaacgagttggctccttctgtgatcgtgacaggcagtaacgtgacgatcttcctatccgcccgtatcgaaaaagttcctttagtgtacgtcaaaccagtggcgatgtcccgtccgcattttgatcatgaagtgggttgtattattcctagtcagctggataaagcctacctgccgaagtcggttctgtggaagctttttctgagggcttctaaacatttgacttggaaacccagtggattcaaaaaggttgcgcagcactacaaactagcactgcctaagtatacgttggatttgctggatggcgatttgaatttaatcacgacacttccggctttcacaaaagatttagtctttccggataattatcaatctgtcggtccgatatttgcgtgtctgccttatgagctgccagctgaggtgagtcgaattattgaaaaagctcgtcagcaaaaaaagccagtcgtctattttgcgatgggcagttcaggaaatcgttcattgatcgaaaagctgttagcctattttgtgaccaccgactatgaggtgatcgcaccaattaaaagctatttgacagaggatttcgttgctggaaatatccatgtctttgattggctgccagcattggaggtttctgaacttgttgatttttcggtgatccatggcggcgaaggaaccgtgcaaatcgcctgctcttctggcaaaccctttattggcatcggcctacaatacgaacaggaagttaacgtcgcatattgcgaaaactttggcaatgcgcttgccttgccgcctaataaattaacaatagaggccttgtcgcgtagtaccaaaaagctgcaatcacccgattatcgaaaaaaagcggaagaaatgcagcatttgatgaagagagtcgatggtgcgaaagctgcggcacagcaaatcgaagagcggtatcttcgttgataaacaaaaaagccatccagatttattaataaaatctggatggcttttttaatgcttgcgtttacgcataaacagaccagcaatcagcccgagtccgccgcaggataacaatgtaagaatagtgataaagctcatctcgatcacattgtagacagtggtttgattagcaattgtattggttataagaacagccggaatcgccagcagtgatgccatccctaaacaagaacccatattccagtgcaagatttttcgagttccgattgtggcccagaaataaacaatccaagtcactgcgatgggaattccaattggccaaagccagtaaaccggagcatctaaaaagtagttattcaccgttcgctcgacaaccataaagaacggaataatcaatacagtgaaaactgataccgagtgaattacgcgataattcttgctgaaaagcaacgcatccaataaggaacctccaaaaatcaacgcactcccgacaatacgaaaccaagtaaattgctgatcaatcgcaaagttcgttacgcccgttattgcgaatgctaaaataaataaaatccagaaaagctttctaccaacacttccctttttatctgaatccttcattagtttccctccttattcctatacaagttttttcccagttcatgttaatcactgtaaaaagtggaactgacatcctacatacctttaatctttcctaaagtataacagtctttatttttccttaatatcagacctgcgacgcattttacctacgacccataaaaatcaatggggttcgataaatttgatcggcggattctcgttcgcatgcttcagaaattcttttggtgtaattccaaattcctttttaaacgctttcaaaaaatgtgcataggagttgaagccgcacttgctgtaaacatcagaggagcttttgtattgcttcaatagctgcttggcatagagcagcttctttttcaggacaaattgatgaaaggtaaagcctgtatgctttttaaattcccgcgtgatatagtacttgctcacataaaaattttgctccatttcctctaaggtcaaaggatgggagagattttctgtaataaaatgaatcatttctacgattcgttcattttggatgatcggcagaccgtgattttcttgggtgtcctcttcgatcaattggttcagctgcatcatgtaatgaaccagctgctgttcataaagaatatctgaaccataaacctcaggggaaggcttttcatctacaaaacgcagcagttcgtgtagtttttccggctttagctgtaataccttgcttcgctgctcgccaactggatggaagcaggcttctaaatttgtccattcagttgagcgatcctgtaaaaatttttccgttaaaaaaatatacacccgttcaaaataatcggtactttgcttcatgatacgatggagatcattgtaatgaatcagcaggacagttccaggaacgatatcaaactgccgattgtctaaataaaaggtcgccacgccttccaaggtagcatgcacttcgtaaaaatcatggtaatggtacacagtcttttcgttatttacattgtcctttacatgataaatctcatattgatcagaaagcattgtattcacataatattttttcttattatggtgggtcatgtaatcactcctagtgaatagttgaacaatcgttgcttattatactgtagttttgtgagggcaggtagagaaataaataaaatttctttcgttatcttttattaattctattaaacatcagaagagagctgagtagttcagattttcaaaattctgcaatttttgacagttttaaatcaaaaattgccatatttaaaaaagagtttccctgctaaactaactcttgtaagcagttacaatgatttttttaggcaattaatcaatctttttagggaaaaaggagtgttttaacatgcagcagatggaaactcggtatacgcatagtccgttggatattcgtcattactcaacggaagaattgcgaaaagaattcttggtagaaaagatttttgcacctggtgaaatcagcttaacgtatactcacaatgaccgaatgatttttggtggtgttacaccgacagatgaagcactggaaatcaaactggatcaagaattaggggtggactattttcttgagcgtcgggagttaggggttattaatattggcggaccaggatttattgaaattgatgggcaaagagatacgatgaaaaagcaggatgggtattatattggcaaggaaacaaagcatgtggtcttcacctctgaagatccgtcaaacccggcgaaattttatatcagctgtgtaccagcgcataaaaaatatccaaatatcaaaattagtattgatcaaatcaagccaatggaaactggtgatggccagacgttaaatgaacggaaaatttatcaatacattcatccgaatgtttgcgaaagctgtcagctacaaatgggttataccattttagagccaggcagtgcttggaataccatgccatgtcatactcacgaacggcgcatggaagcgtatgtttattttgactacgcaacagaagatacgcgggtctttcatatgatgggcaaacccgatgaaaccaaacatttagttgtagacaatgagcaagcagtgatctcgcctagctggtcgattcattctggtgtcggcacaagtaattattcctttatttgggcaatgtgtggtgaaaatattacctatactgatatggatatggtagaaatggatcaaataaaataaagaggagcagactaaaaaatggaatttaagatggacatgtttcgtttagatggaaaaatcgccttggttactggtgcggtctatgggattggttttgaaattgccaagtcattagcagtagctggagcgacgattgttttcaataatttggatcaggcttcggtcgatcaagggttagcaaattatacaaaagagggtattcaggctcatggctatgtttgtgacgttactgatgaggcagcggttcaggccatggttaagcaaatcgaagatgaagtcggcgtgattgatattttagtcaacaacgctgggattattaaacgtattccgatgctagaaatgtctgcggaggatttccgccaagtagtcgacgttgatttgaacgcaccttatttaaaaaagagtttccctgctaaactaactcttgtaagcagttacaatgatttttttaggcaattaatcaatctttttagggaaaaaggagtgttttaacatgcagcagatggaaactcggtatacgcatagtccgttggatattcgtcattactcaacggaagaattgcgaaaagaattcttggtagaaaagatttttgcacctggtgaaatcagcttaacgtatactcacaatgaccgaatgatttttggtggtgttacaccgacagatgaagcactggaaatcaaactggatcaagaattaggggtggactattttcttgagcgtcgggagttaggggttattaatattggcggaccaggatttattgaaattgatgggcaaagagatacgatgaaaaagcaggatgggtattatattggcaaggaaacaaagcatgtggtcttcacctctgaagatccgtcaaacccggcgaaattttatatcagctgtgtaccagcgcataaaaaatatccaaatatcaaaattagtattgatcaaatcaagccaatggaaactggtgatggccagacgttaaatgaacggaaaatttatcaatacattcatccgaatgtttgcgaaagctgtcagctacaaatgggttataccattttagagccaggcagtgcttggaataccatgccatgtcatactcacgaacggcgcatggaagcgtatgtttattttgactacgcaacagaagatacgcgggtctttcatatgatgggcaaacccgatgaaaccaaacatttagttgtagacaatgagcaagcagtgatctcgcctagctggtcgattcattctggtgtcggcacaagtaattattcctttatttgggcaatgtgtggtgaaaatattacctatactgatatggatatggtagaaatggatcaaataaaataaagaggagcagactaaaaaatggaatttaagatggacatgtttcgtttagatggaaaaatcgccttggttactggtgcggtctatgggattggttttgaaattgccaagtcattagcagtagctggagcgacgattgttttcaataatttggatcaggcttcggtcgatcaagggttagcaaattatacaaaagagggtattcaggctcatggctatgtttgtgacgttactgatgaggcagcggttcaggccatggttaagcaaatcgaagatgaagtcggcgtgattgatattttagtcaacaacgctgggattattaaacgtattccgatgctagaaatgtctgcggaggatttccgccaagtagtcgacgttgatttgaacgcaccttttatcgtgtctaaagcagtcctaccatcaatgatcaaaaaaggtcatgggaagatcatcaacatttgttctatgatgagtgaactgggtcgggaaactgttgcgggttatgcagctgctaaaggcggactaaaaatgctgacgaaaaatatttgttcagagttcggagaagcgaatatccagtgtaacgggattggacctggctacatagccacgccgcaaacagcccctttaagagaaaaacaagcagacggctcacgtcatccctttgatcaatttatcgtatcaaaaacaccggccgcgcgttggggtgaaccaagtgatttagcaggcccaacggttttcttggcatcggatgcctctgattttgtgaacgggcatattttatatgttgatggcggcattctagcttatattggtaaacagccgtaagcctatttcgcaaaaggataggaattattagagcgcttgttcctatcctctgatttttacgaatagcaatttttgcaagtttttgatcaatttaagacatttattgtggtctttttatttgttactctattcacgtgaaagaaatgaaagcgatttattaaggagagagcaatggcaattattttagaagaactattcataccaaaagaaacagtcaaagaaaaaatcgatttattaatcgagaatctcacaacgatcaaagatagcagtggagaatttatcctggactttgatggcttgaaggtcgatgataaaagctggactatctggaattggccgcagggagtgggcttatacggtatctataaaaattatcaaataaccaaaaatccagctgctttgaaggtcgttactgattggtttgaggcgcgcatggaagaaggagcgccaccaaaaaatgtcaatacaatggcgcctttattgacgatggcttacttgtacgaagatacacaagatacacgttatatcccttatttagagcaatgggctgaatgggtgatgcacgacatgccgcgaacaaaagaaaacggactgcagcatgcaacttatggtcctgaaaataagaatcaactgtgggatgatacgctgatgatgacggtcttgccattagcaaaaattggaaaattatttaatcgtccagaatatttggaagaagcccggtatcaatttttgattcatatcaaatacttgatggataaaaaaaccggattatggtaccacggctggacctttgaaggaaatcataattacgcagaagcgttttgggcacgagggaattgctggttaaccattgcgatcccagagatcatcgaaattttagaattatcgaaagaggatgctttacggaaattcttacttgaaacattagaagcccaagttaaggccttagcagagtatcaagcggatagcggattatggcatacattgatcgatgacccaacttcatacgaggaatcttctgcagcggctgggtttgcttatggcatattgaaagcggtgcataagaattatttaccgaagaaatatgagaaagttgcgtatcaggcgatcgaaggattattagcgcaaattgatgaaaatggcacggtgcaaaatgtatcagtcgggacaggaatgggagacagcttggatttctataaaaatattgggatcactgcgatgccatacggacaatccttaactgttctatgcctgactgagttgttagtttcttactgctaaagaaaaaggagcaaaacgatgaaaattagatcattgattttaacagccgcagcactagttacaacaacctttcttttaagcggctgcagtaatacgaaagttgcagccgctgacgaacaggcggtaacgttacgttatgcctatgcttccaacagtcagccagtcgttgattcaatgaaggagttcggacgactggtaaaagaaaagacaaatggagaagtcgaaatcgaatattatccagatgcacaattaggtggagaaaccgagctgatcgaattgacgcaaactggagcaatcgattttaccaaggtcagcggttcggccttagaaagcttttcgaaggattactcgatctttggtattccatacctgtttgacgatgaagaacacttcttcagagtgatggaaaatgaaaaaatcatgaatgaaatctatcagtccacagaagagctgggctttgtcggattgacctattatgattcagggcaacggagcttttatatgacagaaggaccgatcaaaacacccgaagatctaaaagggaaaaagattcgtgtgatgcaaagtgagacggcgatcaaaatggtcgagctgcttggtggatcagcggttccgatggggagcaacgaagtatatacctcgctgcaatcgaatttgatcaatggtgctgaaaacaatgagtttgtgctatttaccgctggacatggcggagtagcgaaatattattcctacgatgagcatacccgtgtgccggatgtagtgattatgaatgattcggttaaagagcgtctaactgcagaacaatacaaagctgtacaggaagcggcaaaagaatcgacagaatatgaaaagaaagtattcaaaaaggctgtcgaggaagaaaagaaaatcgcgaccaaggattatggtgttcaatataacgaagtagatagtgaaccattccaaaagctggttcagccattacacgatgagtttaagaacaatgaagattatcgcgagctgtatcaggaaattcgagcgttagcagaaaaggtaggagaagacaaatgaaagcgtttagaaatgggttggataagttcatggagattctatgctctacaatcttagcagcgatggttttgattgtcctctatcaagtgtttgctcggaaggttttgaacaatcccaatacagttacggaggaattggttcgttttggtttagtttgggttgcgatgttagcgtcagcttatgtcgtagggaaaaagagccacttatgtgtcaccttgttaagcgataatttgaatgaaaaaggcaagctctttttagaaattgtcgttcaggttctctttatcttgtttgcggcagtcatcatgatttatggcggctggcaggcttctcttgtgacaatggggcaaatttcgccttcattatcgatccctatgggctatgtgtatttatcggttccagtatcgggagccatcatgcttttatatagtgtaatgaatttattagatagaactcctcgaacagttgaaagtgaggcggaatagttatggctctagaagctggcctgattctttttgtaatttttgcaattcttttaatcgttgggatgccgatcgcgatcagtatcgctgcttcctcgatttgtacattgttgttagtgattccttttgaaaatgcggtctttacctctgcacaaaaaatggtttctagtctaaatagcttttcgttgatcgccattcccttctttgtcttgtcgggaatcattatgaataatggtgggatcgccgagaaactggtgaactttgcaatgctgtttgttggacgaattcctggtggtttagctcatacgaatgttttaggtaacgctcttttcggttccatgtctagttctgcgattgctgcttctacggcaattggcggtgtgttggtaccacagcaggtaaaagctggctatgaccgaaaatttgccacagcggtaaatatcgcttcggctcccactggaatggtgataccgcctagtacggccttcattatgtattcattggttgctggtggcgcttcgatttcagcgttattcatgggcggttatcttgtaggtgctttatggtgtatcggaattatggtggtagcttttattcatgctaagcgtaacaattatcaaacgatcaaaggcgctgaaaaagggaccgcggggaaggttttaaaagaggcgattccgagtgtcatgttaattgtgatcattatcggcggtattctcttcggactgtttacagctgtagaggcttcggcgattgcagtagcgtactccttattgatcgcgatgttctattacaaaacgatcactgttaaagatattcctaaaatgttaacagaagcagtcaaaacgacagggacaatttccttcttgttagcaacctcttcgatgatgtcctttgcgatggcctttacaggaattcctcaagcgatcagtggagcgattttaggattaacaaccaacaagctcatcgttttattattagtcaatattgtcttattacttgtcggtatgttcatggatgtcggtccggcgatattaatctttacaccgatctttttaccagtggtgacgagtgtaggtgttgatcctgtgcactttggtctatttgctattatgaatttgtgtgtcggttcaatcacaccgcctgtcggaacgggattatacgtaggtgccagtgtcggcggcgtcaaggccgaacagatgctgaagccgttgattcccttttatgtcgctattttagtgattttattactgattacttatttcccagcactagttatgtggctgccgaatatggtggggtagaaaaatgttaaatttatcgattcgcggacatgatttgtccgatgttacaacgctagaatctttagctgaaaaaacacaggcacaaaatgtccaaacgctgcaattagcactaggtctttcttttccagattggcctagtgatggcaaaaatctaaatccaggtttagggcaaagggttaaaggggttttgcagaaaagtgagattcaagtagggattttaagctgctatatcaatatgattcatcctgacagcagtctgcgtgaagcagcattaaccaaatttgaaagctatgtccgtcatgctcgttactttggagcgacgatggtagcgacagagacagggaatgtactgccggagattcgttatacgccgaagaattttaccgacgaagcatttaatgacatggttcgagtcattcagcgattggtgaaggttggggaagaacagcagacgctgatcggaattgagccaggattgaatcatccactttactcgttagatcgagtagagcaattaatccaacagatcgattcagattatttagggatcattttagatccgacgaatctgattaccagcgaaacctatcaaaatcaagtggctttggtccaacaagcttttgaacgttttggcgaaaaaatcgttgcgattcatttgaaggactatcaggttcaaaaggatcaaatcgtcccagttaatttagggacagggttgattgattatccagcaatttgtcgcttgattgccaaggaaaaacccggattgtttgttgttttggaagagaccaaggatcaagcgattcacaaagccgttcaattgattgaacaggtattgtagaaacattgtgattgaaaaaggagaatatcatgataaaaaaagcgatcagaatgaacctatatcctggagcgaaagcagaatatcagaaaaggcacgacgaattgtggccggagatgcgggaaatgctgaaggaacatggggtgttaagctattctattttcttagattcagaaagcaatcagcttttcggctatcttgaaatcgaggatgaagaaaagtggaatcaggtttcaactacagccatcaatcagaaatggtggacatatatgaaagatttaatggaaacaaatccagatgattcacctgttagttttgatttggaaccggtatttgaattgtaaaataaaaagtcgaattcagttgaaagattttctttcaactgaattcaacttttttagtttagcgctttttccgcctctgtttgagccattttcgctgttacgtgttcatcgattcgcaagaacggcaagtagataaagacactgactgcaataatgatgatttgtaaaatggcggcgcgccaatcaccacccgttgcgagaaagcctgaaatcactggcggtgtggtccaagggatttggacaaccacgtgattgatcaatcctgcagctgttgcgaaataggctgttactagtgagaagatcggagccaagacgaatggaatgatcagacttagattaaatacgatcggcagaccgaagatgatcggttcgctaatattgaacaaggcaggtgtgacagataatttcgcaaagtctttataatctttccgacgactaaaaacgaaaatcgcgatcagtaaggcaatcgtgtttccagatccacccattacagcgaaagtatctttgaaggccatattaataatatgcgggatttgctcgttattcgcataggcagccatattttcctgcatgttttgtaataagaatgggtcaagcaatgaaccagaaatcacggcttggtgaatcccgaagccaaagaacagattggcaattgatgtaatcaggacaaagccaggtaatccagtagtgacatgactcaaaggacctgtgatggcttttgtaatcagtccattgacatccatattgaacaattgattaacaccaaaagaaagaatcgcaaatactgtgacagtaatcatgatcggaatcaatacattgaatgatttcagaacagccggtggaatatttcccgatagtttgatttgcagcttttcatttatggacagtttgatgaagagttccgtcgctaataaaccaacaaagataccgacgaacatcccagaagcgcccgtatgtgaaccgggaataacgccagtcacctcaatcgcttttttggcattttccggtgtgaacatggttttcatcggtgtcaaaacgatgaaagtcgagattgatactaagacagctgcaatatgattggtataatttctgctgacacacatatgataagaaactgcagcaacaactaatagtgttgtgatacttagggtaccattggcgattgacatgccaatctcttgaatcttcatcagggtggctgggttgatgattttccccatgaagccggtgggttctaagataacgtagttgatcaaggttacgaaaccagctaacatcatgaagggcatgaatgtagcaaaagcgtcacgcaacgttcgcatgtggatctgatttcctagcttggtcgcgataatcccgaagcgttcaaagagctgttcctttttatttgttttctccacgatagattctccttttttgtagaatgctagtttgtctttctctcagtatcctgcgaaaaaaggtactgcatccttatgttttggttgtaagcacttaccttgattacataataaaacggatcgacaataaagtaaatacctttttacaaaaatatatatctttgatttgtaaagtgacaaaaaaagagctgaacactcagctcaaggaatcaattctctacaaaaacagcttcaaaaataaagtcctgatacaaatgtcgcgtaattgagtattcaaaaggtgtgccatttgctaaagaaacactcttttcaatctcaatcataaaatcgccaacatcgatccctaagattttggcatcgaattctgtcgcaaggacacccttcatccaaacgtgagaggcgttgatctctaaatgcagttcatcacgaatgtaggaataaacggatttttttagatgctttggtaccaacccagggataatggaaaggggcataaaggtttgttctaatgagtaaggttgctgatctacaaagcggctgcgaacaatattataaatatagtccttttcgtctatttgcagcatttcagcaacttttttagaaggcaactcaatggaaaaagtatgaatctctgaatccacatgctcttcacctacgacgctcatgagtccttcactaggtccgaaaacctttgaattatcgatcggcttgcgtaatacttcggtaccaaatccacttcggctatgtagaacgccttctgaaacaagcatatccaaccctttttttacggttaacttactcgtattgtacagcttcgctaactcagtacctgatggcagcttctccccaatcgcgtaggtaccatcctcaacttttcgttttacatctagatagacctccatatattttgcctttttcttcataattacctcctttaacaaacgattaaagatataaataattatatacttttgcgaggttttagcaatgctttcgtagttaaaagaattatttagttttaaaagtatattcttttaattaaaaaactatttcattttttagtaagcgatgttatgatgaatgagcaaacaagaaaacctgcctttaacctgccatttctacttcggatacttagaaagagatggcatgaaaatgggcttcacttttaatcggaacgaggaggactacaatgaataaacagcaattaacttttccaacggacttttggtggggatcagcctggtcagccgagcaatcagaaggacgcggggaaacaggtaaagcagaaaccgtctgggaacgctggtataaggagcaaccctatcgcttctatcaaggaattagttcagaaacaaccaccgatcatatccatcgctacaaagaagatgtccagctgatgaagcaaacaggacacaattctttccgtgtgtcgatctcttgggcacggatgtttccagccgatggtgtcggtgaggtcaatcccaaagcgattgaattctatcgcgatttatttacagaaatgaaggataatggcatcaaagtcttcgccaacttgtatcattttgatatgccggcagcgttacaagataaaggcggctgggaatcacgggaggtcgtggatgcgtatgtacatttcgcggatacgtgttttaaagaatttggcgatctggtttatcattggtttaccttcaatgaaccgttggggccaattttaggttcctatttggaagattttcattatccaaatatcattgacttcaaacgaggggcacaggctgcccactttacgattttggctcatgctaaggcgattgcgacccataaaaaacataagcttacgagtaagatcggcgtcattttaaatttaagtccgacctttccacgtagtcaaaatccagcagatgtgaaagccgcagagattgctgatctcttttatgtgcggagttttttagatccgatggtcaaaggggcgtaccctaaaaaattaattgatttactgaaggaatacgaccagctaccggttgattatacggaagaagacttagcatgtatcaaagaaaatacggcgcaaattttaggcttgaattattatgagccaaagcgggtgaaggctcgtctaactgcgattaatccaaaagggccatttttaccagactggttctttgaaaatcatgtgatgccaggccgccgtatgaacgaataccgcggctgggaaatctatgaaaaaggcattcatgatctatgcatggatatcaaggaaaactatggcaacattgaagcctttatctcggaaaatggcatgggcgtcgccaacgaagaacgctttatggatgaaacaggtcaagtgatcgatgattatcgcatcgaatatattcaagatcatttggcttatctatggaaggcaattaatgatggctgcaatatcaaaggctatcatctatggacctttattgattgctggtcatggatcaatgcctacaaaaatcgttatggtttagtctcacttgatttaccaacacaaaaacgtacgatcaaaaaaagcggggaattctacaaacagctcagcgatcaaaatggttttgagtatgaggtggatcgcttaatataacaaacggaaaaaccaatctgaaaaggttggttttttatatggaatttgtttttagtttcatagtatagtcgcccaagtttttttttattaaacaagcgacaagtaagagaagcaatgaatgagtcgaaaaatggactattaaccgagcagaagaaatagcaaacccactatccaaactggaaagcgggttttttgcaagaaattattatttaaacggttcctttcgcataaaagaaaatggcgatttactgatttttccatactcgtcggctctcagatagtcgacctcaacatgaggataggcatttaactctgctatatgatccttcaatatcggaactaataacaacagatcaatgtcaatttcacgcagtaattgtctggcttgtgtcaatgttgcaggatgccagtcataatcaggataaaggttcgaaatgtctttaagcatatccgcagtggcatagtctgttgcaataaaaccccaatcatcagctttttcggatatatagcggtgaacaacaagcaaggctttttccataaatttttcctcaaatccgttcttttttactattgtaaccagtaactcaatcggtctcaaatgaaaaatgtttgtaaattgtattctttcaggggatttctagtaaaagctgcgccctaaaagagcaaacgatctagagaacagaataaaagtgtaaaaacagaaaatatctcctcaaaaggactaatttttttaggggattgtcaaagaaatacaggactgtataattctaattgtaagcggaaacaaaaggaggggccataatggaaaaacaaatcgtaaaaatcttgcctttttttgaagcacgtatttggggcggcaaacggatgctggaaaccttcaattatcagacagatatttatccaattggtgaggtctacaatgtagtggctttgccgggagcagcggattgtccagttgctgataccgatctgacgctctctcagctttatgaagaatatcctgattggttcgattgtgagacggaggaactgccgattcgcgtgaatttattagatcctttagcagatttatctgttcagctccatccagatgatgcctatgccatgaagcacgataattcacgaggaaaaccagaggcttgggtgatcctagatacgcccgcggatggcaaaatcgagtttggtcaccatgcgaaaaccaaggaagaatttgcggagtgggcacatgccggcgattggggaaagctgttgaaatacttgccagccaagaaggaccatttcattgatattccggcagggacattgcatgctatcaatcgcgatgtcttgacctacaacatttcccgtaacgccgatttgacctatcgactatatgattatggacgagtcgatccgaatacaggagaagaaagagaattacacatcgataaagtcttggaaaatgtcttagttcctgatacttcagagggctttgtttggattgaaccttatcaacgaaacggctgtgaaatcactgattattgggatgaaccaggtttatacagtttgagtcggatcaaaacaaaagaacagggaacgtatcggcttaagcgttttgcttttatcacagtagtagatggagcgggcacggtaaatgaggttccgatttcaaagggagaaacagtcttaattccagcggggattgagcacttggagtttaccggggccttagatctattcgtggcgagctataaaaataaggaggcataagatggaaacgaaggaagttgcctacacagcggcaatagagctggcagaaacgttgaaaaaaattgatcaaaaacagatagatcaattggcaaccagtattaagcaagcgaaacggatttttgtatcaggggctggccgttccttgttaatgctgaaggggttggcgatgcgtttgatgcatctggggtatgaagtctatgtagtgggagaagtgacaacgccagcatttttatcggaggatttattgatcgtggccagcgcgtcaggtgaaactacttcattgatcaataccgtaacgaaggcaggaaagatcggcggcaacgtcattagcttgaccgtttttccagaatcaactttagccaaattatctgcgagtattattcgaattcctgcttataccgacaagctgcctgaaagcaaggaaaatcaaaagggaattttgccaggtggcagcatgtttgaagaagcagtcctattactgtcggattccttgattgttgagttggcaatagaacaaaaagttccgactgatcgagcgtttgaaaaacatgcaaatttagagtaagggggaaaataaatgaaattacaactagcaatcgacgaattaactcttaccgaagcgttggaggttctaaaagacattcatccctatatagatattgtcgaagtaggaacaccatttttaattgatgctggtcgtgaagctgttcgccagatcaaagcgacctatccacagcttgaggttttatgcgatgccaaaatcatggatgctggcgcctatgaagcgcagttggcttacgatgccggtgctgattatgtgaccgttttaggcatcactgatgatttaacaatcaagggctgtgttgagcaggctcaaaagcaagtgcggcaagtcatggtggatttgatttgtgtggagaattttgctaaacgggtgccgattatcgaagcattcggtgtggatattatcgcagtccacacaggagcggatcagcagcaggccggaagaacacctttggaggatttgaaggaattgaagcaatatacaaaagatgttcaagtagcagttgctggcggaatcaatgctgagactatcggagattatgtagcgctagatccggatattgtgatcgtcggcagtgggatattgaaggcggatgatccggtggcagcagcgaaagaaatgaaagcagcgttgaactaatttcctttgtgttgcgttttttcatgtacattagacaaatcaagcagaataagtagcagtcatgaaaaaaggtgatgatcattggaagtcctaattaggggaaaacacctttgcgcgcaatattagagatgcgagagggttgccgttgttctatttgatgctatgtcataagccagaccaaaccacgttttctaaagtcgagtttgatcaaaaattacatttaaaatagtagaaaaagagtggtagaccattgattttgaaaaggatcaatggtcgtatatttatccatagcttgaccaataccaatatagtaaggaaataatcttcttcaaaacaagagtagtttcagagaaaattcaagtctctagtattattcagggtcttatggctgtaggtattgttacgcgaggattgatatttgggtagatgaaaagacgccttattattcaggcgtttattttaacattaaaggaagtataacattttaagcggtcaaaggattgatacatcaatcttttgaccgcttttcatctggtctttttcctattaaactggagatatgaaacccaatattttacacgccattttctttgatgaatatcaaaactgggagaaattcaatcaaaggtacacaagaaggattcgatccgttgtgaaaagagaagtgaagaagtttcgcgattgtggtgaccttaaaaaaggttatcgtctatttgtctgtgaaggatgccatgatgtaaagaaagtggcttttcgttgtaaagggaaattttgtccaacttgtgcaactggggaaagtcaacggtgggcagaggttgcggcgaatgatctgtttacagtgacgcatcgacacgtcatcttcacgatcgatgaaggtttacgtgagatttttctgaaggagaagtatcgtaaggagcttttaaaaggattaatggatgaagctgcacggatactattagatttttttagaaagcaccatatacaagctggggttgtggcaacactccacaccttcggttctcagctagaatacaatccgcatgttcatttagtcgtcaccatgggtggactgacgaaggatggaaaatggaaggactatgactattttccgttcgcaatgttgaggaaatattggcagaatgcggtcctaaagctcattcgaagaaccttatcccaatgggataaggcacgagtccagccgcttttacaagcggcgtacacgaaaaatgcagagggtttttacgtgcatgcacccaaaaggagccgaacttctctcaaaaagatattagaatatatcagtcgttatatgaaacgtggtcccattgctttaaatcgtatccttttgtacgatgggaaaatagtgatgtttcagtatcatgataaacgaactaacacggataagataaagacgatgtcggcagaggaatttattggtgcactgattcgtcatattccagagaaccagttcaaaacaattcgtagatacggcatttatagtcggcggatcaagacaatcatgaaaaaagtattaagtaattaccagaaagagattcaacgaatgcttgtgaatgtgaagaaagcacttaaaccaaaatcatggtgtgaacgaatagccgaagaattcggagtaaatccattggaatgtactagatgtggcgaatattatgaatttagtggagttagtgtgtctaaaaatggacgacttgtagtgaaatatgcgaagaataaagaatcggaacgattcatgcgagaggagaataaaaaaattggggaagaagcatcgaaacgtaagtatgaaaaagaaaaagaagcagcttttaaaaaacttcgattccaatggagtggttcattacatttgtcttgaatgtgggataaaggaaaaaattccaaaggaagtagttcaatttttggatgcaggagatgttgcatttgatcctgagaacgctccgcaatttgattgcgaaaaatgtggtggagagatgtatccagaatactataagaacgtacttggatacgaatttagaatcagtgatcgacaataaaatgatttatctaaacaaaaagtcctcaggagcggttttctcctgaggttttcttaacattaaaggaagtataacattttaagcggtcaaaggattgatacatcaatcttttgaccgcttttcatctggtctttttcctattaaactggagatatgaaacccaatattttacacgccattttctttgatgaatatcaaaactgggagaaattcaatcaaaggtacacaagaaggattcgatccgttgtgaaaagagaagtgaagaagtttcgcgattgtggtgaccttaaaaaaggttatcgtctatttgtctgtgaaggatgccatgatgtaaagaaagtggcttttcgttgtaaagggaaattttgtccaacttgtgcaactggggaaagtcaacggtgggcagaggttgcggcgaatgatctgtttacagtgacgcatcgacacgtcatcttcacgatcgatgaaggtttacgtgagatttttctgaaggagaagtatcgtaaggagcttttaaaaggattaatggatgaagctgcacggatactattagatttttttagaaagcaccatatacaagctggggttgtggcaacactccacaccttcggttctcagctagaatacaatccgcatgttcatttagtcgtcaccatgggtggactgacgaaggatggaaaatggaaggactatgactattttccgttcgcaatgttgaggaaatattggcagaatgcggtcctaaagctcattcgaagaaccttatcccaatgggataaggcacgagtccagccgcttttacaagcggcgtacacgaaaaatgcagagggtttttacgtgcatgcacccaaaaggagccgaacttctctcaaaaagatattagaatatatcagtcgttatatgaaacgtggtcccattgctttaaatcgtatccttttgtacgatgggaaaatagtgatgtttcagtatcatgataaacgaactaacacggataagataaagacgatgtcggcagaggaatttattggtgcactgattcgtcatattccagagaaccagttcaaaacaattcgtagatacggcatttatagtcggcggatcaagacaatcatgaaaaaagtattaagtaattaccagaaagagattcaacgaatgcttgtgaatgtgaagaaagcacttaaaccaaaatcatggtgtgaacgaatagccgaagaattcggagtaaatccattggaatgtactagatgtggcgaatattatgaatttagtggagttagtgtgtctaaaaatggacgacttgtagtgaaatatgcgaagaataaagaatcggaacgattcatgcgagaggagaataaaaaaattggggaagaagcatcgaaacgtaagtatgaaaaagaaaaagaagcagcttttaaaaaacttcgattccaatggagtggttcattacatttgtcttgaatgtgggataaaggaaaaaattccaaaggaagtagttcaatttttggatgcaggagatgttgcatttgatcctgagaacgctccgcaatttgattgcgaaaaatgtggtggagagatgtatccagaatactataagaacgtacttggatacgaatttagaatcagtgatcgacaataaaatgatttatctaaacaaaaagtcctcaggagcggttttctcctgaggttttcttatcatgtggaggatcttggatttgatttgctgtttcctcaatttcaatcaccagttttactcctgtatcaaaatctctaataagaatatccattaccttagcttctaatccatgaggctttgatcttccctgagaccagttttgaaaagtacgttcattaacatttaataaatcagggagattcaggtgtttttgttttgccttttgctttactactcttatctgataggcatactttcggttttcttctttggttttttcacgtttttttctagcaatatttaatttatgctcttctagttgttgagctaagataggggtaaatctttttaatgattctgtaactagcacttcatcttttttttccagggtaataatttcttctaactcatcatcagaaatccccatttttttggcaagctgttcagatccccaattcatactattagaaatcgtgagtaactcctctgttttatcttcataaggaatcgtatcccaaaaatttggattaaaaatattcggatttatcgacattcaactcatctcctttactaacatggacagcaagcaacaattcaaatttatgcacgcgaatcatttcgaaagcttccgaatacctattttcgcttgtgattcctttgtcaaaaaaacataaaaaatatttgttaacagtttcagtaatgaaacgatttgcccctctgttaggtactggattattacctataagaaaaagtccgcgaaaagcaacacttcgttttctcaagaaatttctcaattctgaaaattcgggaattgatttgttgattagatcttcccgcaaatcaattcgaaactcgaatattgacgtatcatgattgcttcgactcatatgcttaatgaatcgtatttttttgaggaagataatctttccacgatagttgatagtcagatcactctttgtcagttaggcttttcgcagtattcaacgatcgggatatactcatttttagatagaaaataaccgatggtgctgtgtagcctaatgatatgcgtggcgagcatcagactatttttccggtttttggaaaaataaatccctaatttcgagatagtttgataaaagtgatttctccatgatactctcttttttggatattcttattgtcaaaatcagaaaaaatagcatgatcaattcgatctagttccttaaaaactgattcatggatggctagttttaactcttctaattcctcttctgagtctaatcctgttggaaaacgactaaattccgttgaagctcctctgaaactttcctttggtaaattccgaaactcataagaattatatggctctagtaaagcaggtgaaacattgatcgtcatatctttacctccatttatacgcaaattgcgctttttttcaattgtgataaaggaaaattgattttttcgaaccccattcgctctatcagtataaaaatacgaaatctaatcaactaaactggtgaaacttaacgtgaaaaaaatgtttattctctctactaaagaaacgctcctcattattaagtcaagagcaggattagagaaatctttatgtgaacaaacataaaaggagttgggaaagttcccaactccttttacaattgcttaatctgctttaagaaattttgaaagtcgctttgctgtagaatcgcttgctggatatcctcgcgttccattaattccagcagcagactgtagatttcctctgtatcttcgtagtcttctttactaatggcaaacaggaaaacaaatttaactagatcgccgtcgccccaatccacaccttcaggcagtaccgcgacggctaccgctgagcgcttggccaatagggacattggatggggaattgccaaccattcattgatatttgtttgattgatggcttcccgcttcataatactgtcatggaaatcttcaggaataaaatctagcttgaataattgctgcgtcatttttttgagcagctgctctttgttctctacgtcaccgtaaaaataaaactcctctcgaaacaacgaataaatttcaccgttcgcttcattaaaattcgctatgaagttctcgattttaacgatttctttatctaattttgccatattgatatagatatgaggaacacttaattgctctagcggcacggtcgtaatgataaaatcaatcgtggatagattgcattgctgcagctctacataggaaaaccgatccactacctcaagggtatcctgataattcttattgatcttggcttcgataatccggctcatagcgcgtcctgttccgcagacaagaatcactcgatattttcgattattgctgacagagtttcgttccattgctcctgcgatatgcaaggcgatgtagcccacctcgtcttgtgaaaaatacaatccatgcttttcccctaatatttctaagtgggtcaggcataaatcataagcctggggaaaggactttttaatcgtcgccaacagaggattgctgcggcgggcctccatcaggttcatattaataaagccttcaatatgtgaggttagatcctccaccagtgttgcgtcctgaacccaatcgaagttcgacgtacgtttaatcacctgcaataactcttcaacgagggttttcgcggtttctgtcgaagaggtgcttgtcagttccgtttccaccagacgtggtgcatttaatgccaagtagtacgtaaaatattccttttcagcagcagttaattgaatgtcgaaggcgcgatcaatttcgcccaaaaaacgactgagagcatctttagcttcctgcttcaagataggaacgcgtacaggaaaatcagtgatgacatgcccatcaagaaaacgacttaacgctaaggcaaaatgagaaagaatattcttatgataataatccgaatccaataatcccaaaggcgcgagggattcaagctccagctgttgtaagaggtcaagatcgatattgtcaaatagagccaactccatctccgtaaagcccactagatattcctgtaaatctttttcgatcaataaatcgctgattgcctgccgctttgcaaattcattccctagaagctcaaacccaatgttgggacgattgatgatcttcaattgataggtcaacaaattgtcgcgagctgtttttaaataagagtaaaaggtatttttgctaatgaacagccgatccaaaaaatcatccaacgataaaggggtttcatttttaaataaaaggaacagtaaataagcttggcgttcttcactggtcgttaaaaaagattccgcagaggtcatactttctgtccaccagtcgttgaactgttctttagaatgaatcgtcaataaatagccctgtccacgaaggagagtgatcgtggcaccgacattgcttaatagatcatttagattggcaatgtccgttcgcacggttcgctcagaaatcgagaagcttttggctaattccttcatcggcagcggagtggtttgtttggctaataattctagtaggtcatctaaacgttgataagcaagctttgacacgtatttcacctccggttcttaacccaatcatacaatatagaagaaaagattgaaatcgttccgtcgtactggatttttccaaaagagttggcaatctctttggaaaacgctttactaatgattgccaaattagttggaaattggaagtgtttacacaaaggcccagaactcgtaaattaaacgtgtaaagcgaaacgttacatgaatcaaaaactaaacaattaagaaaggggcttccgatatggactttaacgaatcaacaatccttttggatgtagcggtcgcttcgaagaaagaactatttgaagtcattgcgaattatgcctatgaattgggatttgtcgcaaatgcggctgagacctgcgaagcttttatcgaacgtgaagcagaatattcgactggcttgcaggatggctttgcgatcccacatgcgaaagcgaaaaccgttttgaagccgactgttttattcattcgcttgaaacaggagatcgaatgggagacttttgatgattccgcggtgaaaaatatttttgccctaatggttcccaaagaagacggaggaacggttcatctggaaatgctgagtcggttggcgacggcgttattggaagagtcgtttatccagcaggttcaacgatcagaagataaaacacaattagttgaattgatcaaaaaagaaatgattggagagaggatcaaatgaaaatagtaggaatttccgcgtgtccagcaggtttggcacacacaccaatggccgctaaagccttagaaaaggccggcgcgaagatgggctacgatgtcaaaatcgaacaacagggctcattaggacaagtcaataagattagtacagaagaagcaaaagaggctgattttttactgttggcaaccgatcaaaaggtggagggactggaacgatttgaaggaaaaccgcagctgcgcgtgaatatcaatacttgtatcaaggcaccagaggctgttttgaagaaatgtatcgctgctgttcagcaaagacaagcaaattaaagaaaaggagcaagaatgatgaagaaagttctagcagatttaaagggccacttaatgagtgggatcagttttgtactgccgttgattattggtgcttccctagtcgttgcgatcccgaaaatgatcgcccttggcatggggataacgagtttagatccatatgcagaagcagaaggcttcaaacatgcactttatttgattgaacaagttggttggactgggattggcttgatcaacactgtattagctggatttattgcttattccatcggcgataaggctgcattaggtgcagggtttatcggcggtgccgttgcttcaagtacaaatgccggttttcttggtgcggtaatcgctggtttcttagctggttacttagtgaaatggtcgaaggaaaaaatcaaattaccagaatcattctcaggcgtgatgccgttagtcatcttaccgttgatcgcgaccatgtctgtggcgatcgttatgggggcacttttatcggagccgttagcatggattaatactagtctcgttgattggattcgtaatatgatcgaaaacgatgtgaacaagatcttgctggctatgatcatgggtgcaatgatcgggtctgacttaggcggaccagtgaataaagcagcatggatggccggaaatgtcttattagcagaaggtgtttacttgccagcgattatcgttaacgtagcgatctgtgcggttccatttggttatgccttggctactttattccacaaaaaacgttttaacaacgaactattagatgccggtcgcaacaattttatcatgggtttcatcggaattacagaaggcgctattccttttacgttggttaatccattacgtttggttcccatcaatatgctcggcggagcgattgcttctggtttaggaattgcgcttggtatgtacgcaaaaatgccgcctgtaggagggatttacggcttcttcacagttgggaatggctgggcgtatctgattggtctattcgtcggagcagctttcatcggctttgtcgcaccattattcgttaacttcaataaacaggaagaacaaacggatgaagttgaattagaagatattgatattagctttgaaaattagccaaaaaagttagttcgctaaactagacaaaaaattaataggcactgacgatgcagatcgttgagtgcctattttaatcaaacgagaggaatttttacatgaaaaaaacagtacacgttgtacctcacagtcattgggatcgcgaatggtatttcaccaccagccgatcaaaaatttacttgatgcatgatttaaaaaaagttttagagcagctagagaaggacaatccttacgatagttttattttagacggacaggcttcgttattggatgattacttgaaatggcgtccgcaggatcaagcgcgaattagaacgctggttcagcagggcaagctgatcattggtccttggtatacgcaaaccgatcagctggtgatttcaggcgaaagcattgtccgcaatatgctgtacggcatgaagatttgtgaagagttcggggactacatgaatgttggttacgtaccggattccttcggacaagcagccagcatgccacagatttatcgcgagtttgggatcagcgatacgatgttttggcgcggggtgagtgacgatgatgtgacgcataccgaatacacttggcgcggggaagacggctccgttgtgaacgtgtatcagatccccagcggctattacattggcggggcgattcctgagcgggaagcagatttagccgagttcctgcatcaagagccttttaaaacgacgtggggtcgcagcgcaacggatcaggtttattttccgaatggctttgaccaagcaccggtgagagaaaacctgccggagttagtcgaacaaatgaatgagctttaccaaggggaatatgagctgcaattttcaacgattgaaaaatacatcgcggcagtcaaagaacgccatccggaattagaagaagttgccggtgagctgatcaacggaaagttgatgcgtatccacaaaacgattttctcttcacggccagacttgaaggcactgaatacgcaaattcagcattatctggtaaatgtgatggagccagtgttgacgatggcgatgcaattaggttttgaataccccgtagaaacagttaaggaaatttggaagctgatgtttgagaatgcggcacacgattcgatcggttcctgtgtgtcggatacgacaaatgaggatgtctatatgcgctacaaacaagcgcgagatatttccatgaacctagtagaattaacattacgtcaaatctcaaccgccatcaataatccgcagacacaagaaatcacgtttacgctgtttaatacctacgacactgcgcgtgaaggcgtgatcgaagcagaagtttatctaccgcaaaagacatttgcgatcctcgatcaagcaggaaatttcttgccttatacgatcctagaactgatcgatcagacggaatatgttctgaaccaagggaatatcttgaattccgtcaaagaaatctatttgccggaaaaagtctataaagccaaagtcgcgatcgaaacgaccacggtaccaagcattggctatacccagttgacgattgatctaaaaggcgatagcagtgcacccttacaagccgcttcgaatacgatgatcgaaaatgagtattatcaaatcacgatcaacccgaatggctcactcgatattttggacaaggccaatgatattctctacaagaatcaaggaatcattgaggaaaatggcgatgatggcgactccttcaattattcgccgccagttaaggattggacgatttcatcgactgatgttgaccctaaaatcacgatccaacaatccgatatttatcaatcggtacgtttagaattcttgttgaaggttcctcaaaacttgagtgaacggtctgagaaacaggcgacagcggaattaccgatcgttcttgaattagtcttgaagaaaaattcgccgatcattgatttcaatttgacggtggacaatcaagccgtggatagtcatcgggtctgtgttttgtttgatactgggatcacctcgaaattctcgatcgctgatcagcaattcggcacgttgcagcgtccagttgtttttgaaaaagaaatggctctatgggaagccaacaaagagcaatggaatgaacagccgatcgccatcgaaacctgccagtcttttgtcggtttattcgatgagacgcatggcgttgcagtgatgccaaaaggagtgcgggaatatgaaatcgttggtgaggactatgacacaattcgcttaacgattttccggacctatggcttcatggggaaagaaaatctgatgtatcgtcctggaagggcatcaggcgaaacggtgatcgccaccccagacgcgcaatgtcataagacgatgagctttgatttttcggttgcttactttgcgcaaggctttgatcaagccaacgtagctcaacttgccaaacaagctgtgactccgatagaactgtatcaatacgcggaattcttaaactcgcgtctgatctttacgctaggtgatgtcgaacctacgctacccgctgaattcagcctttttgagattacaggaaatctgacgctgagtgttttgaaaaaagccgaagatagcccgggctatattattcggttgtataatggtttgcttattgaagagggatacgcaacgatcaccttcaagcatgaaatcaaaattgcggaaaaagttgatttgaaagaaaaaacaaaggaaccgctgccaataattaatgatacaatagaactcgagaacatcgggcacgcgaaattcgtgaccttgtatgttgaataaatctaaatgattgtgagtgaagcttagtggaaaaattatttggcgggatcgaggccggcggaacaaaatttgtttgtgcagtgggaaataatgatctggaaatcgtggagcgggtcagttatccgacgactactccagaagagacgatggcattagtgatcagcttcttcaagcagtatgaagagcaattagtcagtattggtgtggggtcatttgggccgatcgatattcatcgcgattcaaaaacctatggttacattacgtcaacaccaaaattggcttggcagaattttgattttgtcggcaccatgaaaaaggaattcgatttaccgatcgcttggacgactgatgtgaacgcagcttgttatggcgaatatgtaaagggtcgcggcgatggcgtgaacagtgtcgtgtattataccattggtactggcatcggcggcggcgcgttgcaaaaaggcaattttattgaaggcttcagtcatccagaaatgggtcatgtgttagtaagccgcaatcctgaagatgattttgaaggaagctgtcctttccacggacattgtttagaaggaatggcggcaggtccagcgattgaaaaacgtttaggacgcaaaggtcaggacttaagcgaagacgatccatattgggacattgaagcggattacatcgcacaatgtgcctacaatacgaccttgatgttttcaccagatgtgatcatctttggcggcggtgtgatgcagcaggagcatttagttaaaaaggttcgcgtgcgtttcaaagaattagtgaatgattatgtaaaaacacctgaattagaagattatattgtgacaccaaagcttggtaataatgccggaacaattggctgtttagctttagccagagaagcgaaattacattcataataaaataagctccgtcaactcgctcttagtaagctactgagcgagttggcggagttttttaagtgcgtattccttctgattcgttttgagagttgctataatttagatagaaatcgaacggaggacgtacgatgaaggagaattatttcttaaaattcgaaaaagcgatcagtacggtcgtggatatattattagctgtattgataattgttgttgtcattgtcatgggggaaggcatcatcaatatgatcatgcacgtgattccattgaataatgtatcggaattgaccctcttgattgatgaaatcgcgacgctgttcattttattggaagtcatattgatgctgctgcgttacatcaaggaagggcatcatattcctgttcgttacttgattctaatcagtattaccgccatcctgcgggagctattactggctcacggaaacggaacgaattctttgttattatctatctcgattttggttttggtgggtgtcttattcattttggaaaaggtcaaggcctttcataagggtgaaagccgcatagaaaaataaaatggcttcgtaccaatattggtacaaaaccattttttgataaacagagcgatttaagccgctgccgttttccgtgattttagaatgtattgaatacctgtatagaaaataataacaataactaaataagtgaccattgaaatgtctaagttcattaaaaattgtgacgcgatgataacgccgggaatcccgccgatcgtgatcgccaaggcaatttttctagaataagctttttcacgaatgaagttgatactagcgactggttgaagtcccgcgcatgaacacatcatgataggaaaagcagctaatggtgtcattcctagcatgtagaccatcgccatacatggcgcatatagcccaacaccaaccgtcatcaaggcaccgaataagaagttgccgatgataccgatgactaatttccccccgcttaatcccatcgcggtatttcctttacccaataaggcaatgacttccgtttgacgtagcaacatcaaaatcgctgtaatcaataatgcccaaccaatccatttttgaaccgctgtttcggatagcttagtaacatatcttgatccgaaccaagagccgacgatcgccgctaagattaaagcgactaaagtcaacgcatcaactttgataactgtgacgaaaatcacagcttcagtcaagacagggatcgcgtgcccaacatttaaaattccaggtaattttcgatcatcagtattttgtttcgtaacatttaacatcatggtggtgagtgcaaaactcccaattccaatcgtatctgcaaaatctgcaatgaagccaataattccgctaattagccaatttcctggacctaaatcatcgcgatgggtcacaacatcgcgcacaagcatgattgcttgaaagatcatcagtccaattaaaatataaaaaataatctgtgccataaatcctcccgtaggtctttttcttataattataacaataaacgaaatagaaaaaccataaaattcgaaaaaattgtgattcattgaacgatcgcaagaaaaaataagtccgatttagcctaaaaatctaagtatagcttcaagaattctcgactggctaacgagagcaaggacttgttacgataaaggactccgactttacgaaagaccggatgaacgaatggtctagtctcgacttgaaaagcgattcgttgcagaatcaatttgggtaaaatactaatccctaaatttttctctaccattgccaaaatcgaataatcatcccatgtgcgaaattttatttgtggtgaaacctgtgcttttgctaataattcagtgacgtcagaggttccttcacgttctagtagaataaaaggttgcgcttttagatcggtcacatggactttttctttagctaaaaaaggatgcccctgcggcaaaacgaccagctgctcatcgtcatggagaaatctttgctccaaattatgggacgcaggtaatcgtgaaaagccgaaatcaacgcgcccctctaagatccactgttcgatctcttcgtaatctcccaataataattcaaaatcaatcttaggatagtccttttgaaacgtttcgatcgcttcaggcagccaatgagtagccacactcgaaaatgtcccgatacggatcagacctgtgtctaaatgccccagctctgccaactgattttgcaaggtttgatatttttccgccagctcctttgcataaggcaacacattcatcccatcagacgttaaccgaaggcccgcgcggttgcgctccaacaaagtgatcccccattcttgctcgagatcatgaatcattcgactgattcccgattgagagtagtttaaaattttagccgctttagtgaagctgcccagttcaacagttttaacaaaagcgatgtatttctgaatgttcatatccatgattgaattctcctattcatttgaactgatatgtgaataagcatttattgcatctgttttcatcatattaaagatgctaaaaattcgtttttgtaatccttatttctatgataaattactgctagtaactattcaatagaagaagacagcgtacacaaatgacaagctgccaaaatttacaggttagaaaaaaggagtgagtaaaatggtattagtcagtgaagcctatacatcagtaccagaaatatgcaacacgccattgcaggaaaaagtctatcaggtcctgcaagaattagatatggcgtttcagcgagtggagacagaggaagtcatcacgatggaggattgccagcaaattaatgaacgtttagagatggatatggtgaaaaccttgttcttatgtaatcggcaaaaaacaaatttttatctattcgtcacctgtggcgacaagcccttcaaatcgaaggaattcagtcaggcgttggaaattgctcgggtttcatttgcctcagcagagcagatggctgaaatgttaggagcaaaaatcggtgcggcaacaatctttagtacgttgctggaagaagccaagaaggttcagctagttctggataaggatgtctgtgatcaagaatattacggctgcagcgatggcacaacgacagggtatttgaaattacgtacaagtgatgttctgcaaaaatacttgccttatgttaagcgtcagccgaaaattattgaagtttaaaaagagtactttatagcagattccccaaaaaaattggggtctgcttttttaatttgacccagcgaaccaatagaaataagaaatagtttgtattatgtggaaaaagttctaataattcatttctatctatgctaaaattttgtgtattacgtattaattaggaggccttgtgggtaaaaaaatcatatttataatagtaatagttgttttattccttttcgaaacgcctgctcatgctgctgaggacattatggagattaccaaatcagcaggctacaccgatgtgttagaggaaaacaaaccaaaagcttcgatcgtggttgatggaacgaatggtcagatattatgggaagagaacgctgatgtggtcagagaacccgccagtatctctaaaatgatgacggtctttttagtttttgatgccataaaagaaggaaaattgactttagacacgaaaatcaaggcaacggaaaaggatcaagccatcagtcaattgtacgccatcagtaataataatattgtagcaggtgtcgagtatcctgttaaagagctattgaaaatggtcgttgtgccgtcatcgaatgtagcgacggttatgttagcaaatgtcgtttcgaataatcgtgcgggtgaatttgtcgaaaagatgaatgaaaaagctcaaaaaatcggtatgaagaatactgctttttataattgcagtggtgcttcagctgtgagctttgaggggctttacacgccagaaggcttcgatgcgaatggcagtaatactgcaactgctcgtgatttggctacaatggtttttcatttgattaacgagcatccagaagtattggaatttacgaatcagccaaaggtcactgccatggagggaacgccctatgaagagacctttgaaacctacaattattcattgcctggagcaaaatatggttttgaaggtgtagatggcttgaaaacgggttctggtcctagcagtgccttcaattatattgcaacggccaagcagggagatactcgtttgattgaagtgatcttaggggtgggcgactggtctgatcaagacggagaatactatcgtcatccctttggtaatgcgttgcttaaaaaagtttttgatgagtatgaacatcgcttgctcctaccaaaaggaatccacgagattgaaggaaaaccgatacagctagcgaatgatttttatggtgtcgtgaaaaaaggcgaggaaccagaaatgacgctccaagaaaatcgggtgtcgttagccagtcagaaggagcagctgacagaagacatgccgaaattatcgctgaactataaaaaagtagaaaccgaagaaaagcgtcttccggcaacgagaaaagtctcaatagttgagcaggcaaaggcgtatatcttcccatccctgctgcttattctaggagtggcgctgttactttttccagtgaagaaaaaaacattaggacggacaagaagcagctctcgccgtaaaggtgtggtggtattcagaattgctggaattgtatgtgttcttgcttcattatttatgatgatctgggaaatactttagagaaccgaaaaacagagtgaatcgccaaaataggcgaatcactctgtttttaatttctatcagcagcaatccaatggacagcctaagcgttcggcgatggctagtcctgatggtgtttgtgccaagccggcatgacctgtacagcgtagtgatgctggaatcatccgaccaactttattgaagctttcgatggtttcatctaacggaataacgacatcatagccagccagcgccatgttggcagcacccaatgcgttcattccgcacatcatatttttcccaagacaaggaacttctacccgaacaccaattgggtcacaggtcattccgaagacattttgcaagcccatagatgcggcattgactgcttcttcgatggttccgcccattaattgcacgagtgcgcccgcagtcataccagaacccgaaccacattccgcctgacagcctgccacctctgcggcaaatgtagcatattccgcaatgaagacaccaatcattcccgcagctaagagcgcgcgaaccaattcatcatgggactttttttgataatcactaacagcgatcaaggttcctggtaatgcgccgcaggaacctgccgttggcgctgcaacaaatacattcatcgagcttttgacttccattaaggcagagatattctcgatgattttagctggcagcgcatctcctatcagccgatcgcgattagcacggattttcggcgcctgagaacccagcattcgatcttcataggaagtgccggtcaagccgatttgaatgccgttttccataatttcaagaattacttccgcctttttatagacttcttcttcggaaatactgccgcgatgactttcatagcgcagcgccatatcggccagatctaaattttcctcttttgctagagcaatcatctcttcggctgttgaaaagagcatctttggttccttttgcgacataataggcaggataggatcaaatgcaatgaatcgttcaaccttcatctgcttattcagccaagcgatttctatttcagaaatctcctgttgagtcttgatatgcagcatcgttttaccagcttgttccttgacgacagctgagcagaatttgtcgattttatcttctaagtcagtttcagataacgtcaaagactcaccgaacaggagggtctcatagaagcctccagtaacttcgacagcaaaatgattgatttcggtgatctcgatcatccctccgccaacagaaagagcagttacatctagttcttctcccagatctgttttgactgtcattttataagtgttaggatggttgttttcgtaaggaatcacacggaaaacaatttccatgccatccgcttcagcaatttcaagagcacgtgtcaaccgattgtccgtcgggtccattcccagcaagcccccaactagaccgatatcggagcactgcgtaatatagcttgcagctaacgaaccctctggatcaaaatctgcctgaaaatagatgatttttccaacgaccatctgccgcagcgcacgtccaatccgcaccgaggctgccgtatgggaacttgaaggaccgatcatcaccgggcctaacacatcattaaaaatactggcatgttctttcattcgcgtcctccttagaaatccgctttgatataaacatcctcacctgcgatttcgtcaccgattacgtctttccacttgtctgcttcaatctccttgaatgacaccgagaccacattcggggtacaaccaagttccttcaccacgaaatcctgcaattttttagcaaagtcctgttttacttcttccgaacgaccagggtacattttgactgataaatgtggcatttttattcctcctactacaatatatttataggttataaggtactactaatcccattagtaatcccttttatctatcatgttgcttaagctgttaaaatgagagggcaatggtcgggcatattcctccttggactttgcgtccgtgattaagtctgccaaccagctgctcattcacagcgttcgttttatgcaggttgaactgctgtttaccagtacgttcgtgtcacaccccagtagattgaatcggcaatgtgtttacgctggctttccattgcgacaaaactgaaggagctgattgtcttgaacgcagtaggtattgatgttgctaaaggtaaaagtgttgtttcgattctccgacctttcggtgaagtgatctctagtccctttgaactctgtcatacttctagtgccatcgacgacttcattcattctctttcaaacctagaaggagaagttagaatcgtcttggaatacactggacgctatcacgaacccattgctcgttggctctcggatgcggatttttatgtcagtgtggtcaatccaaaactcattaaagattttggaaacaattctcttcgtaaagtgaaatctgacaaaaaagatgcactcaaaattgctcgttacgctcttgacaactggaatgacctacgacagtattgctttatggacaagacaagagatcaactaaaaaccatgaaccgacagtttgatttttacatgaaacataagaccgctcttaaaaataatctcattgctcttttggatcaaacctttcctggagcgaatacttttttcaccagtcctgttcgaaaagatggcagccagaaatgggttgattttgtcgcctctttttggcacgtcgattgtgttcgcaaggtctctttgagtgtgttcactgaacgttatcggaagttctgtgtgcgtaaaggttacgacttccatccagataaaccagcgcaaattttcgaagcctctaaagagttgattgctcttttacctaaagacaaaatgaccaaaaacttaattatgcaagcaattgaacagttaaacactctttctaggactattgagcagttacgcctacagatggatcaaacagctgcacaattaccagaatatcctgtagttatggctatgaaaggtgtaggtccttctttaggtccacagatcatggcagagattggcgatgttcgccgcttttcacgtcgaggcgccttgactgcttttgcaggggttgatccaggtgtcaatcaatccagcacctataatcagaaaagtgtacgaacttctaaacgtggatctgctcaactgcgtaaatcactgtttcaagtaatggacgttttagtgaaaacatcacccgaaaatgatccagtttacgcatttctttctaagaaacgagcagaaggaaaaccgtactatgtttacatgactgctggtgcgaataagtttttgcgtatatattacggtcgagtaaaagagtatctggcttcactttcagaagaggaatgatttttgtttttgagagcataagttgaaaccagcgattatcggtggttctatttgtcatgccttcaatccagatagctctctttccaattttttgcttgactttttatttgcaggcttattggttttaacgtattaatttttcgtggaaaaattattccgatccgaatggcgtataccatccaactaagtaattcagcttttaattatcgttgctgtctcactggctaagcgggctgcgagaagttggactggcatccttatttctattttttatgaccattctgttccgattttttcttccagcgcacgttcatagattttttgggcagtgacgagatcctgagcaccgatcccaacagttttaaaaacgatgatctcttcgtcattttcgcgaccgccaatttttcccatcagcacctctccgatgtctccggtaaaatcgtccttcgtaattgtgccgtcttctagtggtatcaaaatatcaccggcttcggatagcaccgcctcttctgaatcaaaatagagcttgctggcgcgttctaaaattaccgggtccatttcctgcatatgcggttgataagaacctacgcaactgactgtggcaccagccttgactttactgccatcaaaaactggcgaagtggctggggtaacagtgatgatcagatcggcatcattaatcgcttcatctgaagtttccgctggcaaaatttgagtcccatagtccttcagctcttcattcatttgcttaacgaatgcttttgttcgctcagaattttggtcaaaaacgtggaccgtctctaaatcacgcgcacaaatcatcgcctctaattgtgtcgcggcttgtccaccagttccgatcagtgcacctttttttgcatcttttcgacccaagacatcaaaggcaaccccagatgcggcaccagtccgtagctgagtaacagtcacgccatctagtagggcgctgacataacctgtcttgccatctactaacagcacttgagctggggcagaggctaaacctttatcaatattgtcagggaaaatattgatgatttttagggcagctgcatctaaatcaggtgcgtaagacggcatgaataggaatgtgccattttgtttttccgaaacgatctgtgttcgcaacggcacatctgtcttaccctcactaaataattggaaggccaccttgtctgcttcaatggcatccttcatggtaaatacttgtttgatattttcacgagataaaagtagcataaaaacctccttaacgaattttctttcacacctaaaagtataagcgattacaataacggtttcaaaggaatttcaagaattttcttttattctagctactactttgctgataagattatggctgagttaaaaagctggcgctgaagcgacctttagcgaccttggaggaaacatgctgacgtacggagtacgaagcaccgccacgacgagtagctggctgttggcggactggagttaaacctcctttaactgcattaatagaacgattgtaattttattcaaattttttagctattttaaaacatttcacaacaaaagaaattactcaaattgttattgaaaaagcgttttcctttctatatactttgattgaagaaagattcacaaagggtgcaggaggtggaagaaatgtcaaaacgactatgactatgaggtgaaaaccaacttagagtatctaagcgagttcgtgtagcattcttaccctcaaagtattcctgtgcttaaaaaaaatctgatcccatactttcgaaggataagggatgacaaaaatatttggccccccttccttactgacggcgttttagaagtatcttcttcgttaataacctgaagctgtccacttctgtcacagcctttgtgcggaaaaaacgaggtgaaagtaaagctatgactcaccgattcaacgaaccaacaaaaaatcgatcgaaagaaggatttagaaaaatgaaaaagagaattagcggattattacttattactttagcaatatttgccatcgtgttgacaggctgttccaacaacgatggaaagaaagatcgtgccgaagcggatattgattggcaaatgattacaccagaaaagatgaaggacgttcttgaaacagacgatgctgccgattatcaaatcatcgatattcaaccagaggcagactatgaaaaaggccatctgccaaactctatcagcgtaccagcttatccagtagatactgaagaactggaaaaattagtcgtggataatgctgatcaatttaaggatggcgacaacccaatctatgttgtctgcccaggcggtggaagcggtgcgaaacgtacaatctcattactcatcgatgaaggcatcgatgaatctcggttatatatcgttgagaacggtgcgaagaaatggccgtacaaagacgacaataaattatgggtaacagactaaacacaacattcttcagttaatgaatacaaaaacaggctcaatactcatttactgagtttgggcttgtttttgtgtcagtagaaggtttgtatggataggaataggtttgggcatcgttacttagataagtatccttgaaagtcgattatcaacaaattcggatcgaaaaagactttttatacactagtttcaaattgataagaaataaatgaaggcgaataaaggaataaacaggaaaaacggattctttttgcttagaaaaaaattactgaagttttaatgcccttttattactagagactcatttttcatttggaagtataaaaaataaaaagaaaatacggaaaatatttgaatattccgtgaataattgctaccatcttctttgtaagcgtttttaaaaagaaggagatgaatttattgaggaagtcgaatttagttaaaagtgcagtcacattatttacagtcttaggtttcacgttgccatcagggtttgcggcagctgaaacaatcaatacagaagcaacaagtacgcagattagtagtacaagtaacgaaaattctatcagtgaagtaaatagcgaaaccagcagtcagacgacaggggccgattcgactgttgaagcaacagttgaaagtagctcagaactagacaatgaaccaaaaagtacagctactgtcccaattcaattgctgggaattaatgattttcatggtgctctgagtacgacagggagttactatgatgctacaggcaataaaacgtctaatgctggtaccgctgcattgttagccggctactttaatcaagcagagactgcttttaaagctcagaataatacaggaaaaacgttacgtgttcaggctggtgatatggtcggagcaagtccagcaaattcaggcttactgcaggatcagccgacaatgcgaattttaaatcaaatgaaatttgctgttggtacgttaggaaatcatgaatttgatgaaggtttaggagagtttaatcgaattttgacgggaactaaaccagatcctagctctggctttttaccgatcgttaaggaatacaacgaagattattctcaagacgagttaaaaggcggttttgatttagttatagcgaacgtacacgaaaaagacggctctattccttatggctggaaaccatatacgattaaaaacgtcggtactgctgctgaaccaattaacattggttttattggagtggtgactacagaaattcctaatcttgtattagcggaacatcataaagattacacgtttactgatccagccgaagaaattgtcaaatattctaaagaacttgttgatcaagatgtaaacgcaattgttgtccttggtcatacgccatcggtgcaaggatctggtgaaacggtaagcggggaaactgctgagatcatgaataaagtcaaacagaccgatccagacaacagtgttgatgccttctttgcgggacataatcatgtttatacaaatggtgtagtaggaaatacacggatcgttcaatcgacttctcaagggaaaggctatattgacttgcggggagaatacgatccagctactaaagattttgcttcgacaccaaaggcaacggtcagcgctgttgatccgactaagggaattgcgaaggatgctgctatagaagaaatcgtagcggatgcggacacgcgtgttgcacaagtaacggagcaaaaaatcggcacagctgacaaagcagaagatatttctcgtacggtgaatgagatgggtgaatcaccagtcggcaaccttgtgactgatgcacaagtctatatggcgaataaaaatggtgtaccagttgattttgctatgacgaataatggcggtattcgtgacgatctgaaggtgaagccggattcttcaattacttggggagcggctcaggcagttcagccttttggaaatatcatgcagattgtggagatgaccggtcagcaaatcgagaacgtgttgaaccagcaggatgagaaatacttcttacaagtttctggcttaaaatatacagttgagaaaaacgatacttcttttgtggttaaagaaatgaaaaaagcagatggaacaccaatcgaagcagacaaaacgtataagctaatcatcaatgatttcttatacggcggcggggatggtttctctgaattcacgaatgctaaactaacaggtgcattagaccctgacacagaaacctttattggctacatcaaggacttagaagcaaaaggccaaaaggtatcggcagcaattgaaggccgcaaaacattggcaactactgagccaactgatcccgcaaaagaagaaacggaaaaaatcaaagctgaaacaaaattgaacgactatcgcgaaggggataaatatctaacagggaaaacaattccaaacggaaaagtaacgttcacatcagaaaaagcacgagtactggcacaaggaattgcggataaggatgggaacatcagcattgctgttgatcagttagggctaaaagagggtcaagagttagcagtcaccattgcaggagctaacggcggagaagccagctttaccgtaaaagtgttaccaaaagcaactgaaccaaatgatcctgctaaggatgaaactgaaaagatcaaagccaaaacaacattcaacgactaccgtgagggagacaaggttttaactggtcaaacgattccaaaagggaaagtaacaatcacaccggttaaagcacgtgcactagcacaaggcactgcggataaagacggaaaaattaccattgctgttgatcagttaggtctgaaagagggccaagaggtgaccgtgacaattgctggagataatggtggagaagccagctttacagtgaaagttttaccaaaagcaactgaaccaactgatcctgtagctgaagaaacgaaacgaattaaaaatgaaacggaagtggatgatctttacgaagggggtcaatacctgacagggaagacgatttcaaatgcgacagtcgaagtagctgttgaagaaacgactgcggctaacgtcgttcaaccagtggcagtccaagcggcgacggcagctcctcaaaaatcgggtgctgatggtgaatttaaacttgatgtacaagcattaggattacttgaagacgatcaggttcacttaattattaccggcgaaaaaggtggtagtggagaattcttagtcgatgttttaggcgatgcagcagcaaaagaaacagagcaaatcaaaaaggttacaaagtttgcgaatatttatgaaggtgacacagagttgacaggaaaaacgatcgcagatgcaatgattgatgtttctgttgagaagagtgaaaaattcgcattaggcaaatcgaatgaaaaagggaatgtcatccttgatatcaaagacttggatttgaagaaagatcaaaaggtgacgattacggtcactggtccaagtggtgggaaagtcgtttttgagaaaaccgttctaggtaaaattgtggcctccaatgttagtacgaaaacaccaagtagtacgacttggatcgatggtacactgcaaaaggtatatccaaagacgaacgatgaaaagcaaccgatctttatcgtgctgggaatgattgtcttaggtaccagcggtctaatctactttaaacaaaaatagctgcaactatagccgagttcaattctggattcggcttatttattagagatttttttagagttattgtgaagtgtttctctttccgctatactctttatgataacgcttataatttttggggaggtggtcattttgtttatttatcaactatgagtttgagttgggtatggacttagaggctctaagtcggtgagtaagcaaaatttacctcctttctttgatacgtgattttcacgtttatttctgctgatcggaggagcatacagatagtgtatgtttcttttttgtgcgctcacacacatgtaaagattaaaaaaacgataaggggaatgacgatgaaaaggtttaagattggattagcgatgttagcagcggttctagtattgggagcgtgcggatcaaagaaggaagcggcgacggaaaaagatgagaaaaaggatattaaaattgcctgtaatcaagtgtctgagaactcgcttaaggcggcgaaaaaatcaatggaggcagaaggctacaagcttgagtttgtggtgttttcaaataatattgaagcgctgcaggcggttcaggatggcaacgtggatgcgtctttcgcacagcacgaacccttcatgaaatccttcaatgaacaaaagggcggtgatctggcaatgatgaagccgcatgtttattatacagggatcggcctgtattcaagtaaatatgacaagattgatgagttgcctgatggtgcgcaaatcgccattatgaacgacgcgatgaatcgtgacaattctttactgatgatgcaggatgcaggtttaatcaaattgagtgatgagaagaaatcaggctatacggcgttggatattgttgagaatccgaaagattttaaattcgtagaaattgaacaggcacaaacggttcgcagcttggaggatcttgatgcagcgacctgcttctttacctttatgtttaactctggtgaggattacaaggattacttaattcgtgatcagcatgcgaaggattttccgatcagcttgattgttaagaaggaaaataaagacacggattgggcgaaggcaatcaatgaatcctttacgacaaaagagagcaagaagggaatcaatgatcatttcaagggagtgtttactttctatgagtaaatttcaagagctagatcggcggttgaactatttattagagttggagcgtagggttgtagggatcagctttttacgaacacgggcggattttgacacctatgaggcaccagcgactaaaaaattagtcccttattgtcgggcagtccaacaggcaacggaaggaatcagtgtgaaactgtcgatcgataattttggctgtccagcttcggcggttgcgttaggactgatcgaaaacgatgactacagtgcaagcggtcaaaagcatgccaacatgggtgtgtataaggatattgaagtaagtaaggcaatcgcggatgagatggtttattgtaaagaaccttcttatggtgttgcggttgaaccgattgattcttggaagagtgcaccagacgttattttgatgattactacgccatttaatgcgatgcgaatcttacagggaaacgcatattttaatggacaggcgaaaaacatcaagatgacggggatgcaggcgatttgtcaggaagggacctcttatccttatgagactggtttgatcaatatttcgatgatgtgctcggggacacgctatgtggcacgttggaaggatgaggaattatgtgtcggtattccttacgagaaatttgaaagcatgatcgaaggacttgaggcaacgctgaatccaatggagctattagaaaagaaacgcaagatcatcaaaaaaatcgcggaggacgaggttccggatttttatgaggttcgcaaacgcgacaattattttagaggcgcatatcagggcgtgaaacgttaggtgttgagtagatggaaatagtcatcgatcaggttaataaaaggtacggcaagcaaacaatcctagaggatatttcgctgacgattcccgcgggatcaatcatgggaattttaggaatcagcggagcagggaaatccacgttgctgcgctgtatcaatggattggagcaaagccaatccggcagtattagaatcggtacacagctgttagagcagctatcggaaaagcaattgcgggagataaagaaaaaaatcgggatgatttttcaaggaaattccctgattgaacaaaaaacgatttttaaaaatgtcgccctaccattggaatgcagcggctactctaaagaagcaatcaaagaacgcgtagacgaattgctgacagaagttggaatcgccgataaagcgcaaatgaaaccacggcaattatctggtgggcaaaagcagcgggcggcaatcgctagagccttgaccatgaatcctgagattctgttatgtgatgaggcaacttcagctcttgatcccaatatcaccaatggcattttggagctgttactgaaattgaatcagaagatggggctaaccatcgtcgttgtgacccatcaaatggaggttgtgaagaaaatctgtgatcgggtcgctattttacagcagggaaagattgtggaggaagatacggtccaacagttttttttgaataattctgagatattgcaaacaatcacgggagagcagcagacgcaatttggtgtgcagaaggcagaccatcggttagtaaaaatcgtgacacctttgaaggaggatctttttgccttgctgcgacaagcggaaataaaaacaccacatttgttaaaggccacaacagaacagtttaaagcggagacattaacgactttattagtgtctgttcctgacgaagaccttaacaaactaatgaagctttccgctcaggggcattttagttgtctggaggtgaagagcggtgaataattcggtcttgattacccaagtactgctgcctaatttaatcagtacacttatcatggtgatagtctcctcattgattgcgacaatcatcggctttgctttagcggttgttttaataatcacaaataaacaaggcttagcgcctaacgcgaaaatttatcgcctgctggattttatcgtgaacattattcgttcgtttccgtttattattttgatggtggcactgatgccgtttactcgttccatcgtaggaacaaccatcggtacttcggcggcgatcgtgcccttgacctttgcgatgacgccttatgtggcacggctgtttgaaaataatctattggagattaatccgtataccttagatgcggcaaaatcgattggggcgactcatatgcagattattttcaaggtgatgctggtagaggcttttcctagtatgatctcaagcgtgaccttggcgatcatctccgttttaggctataccgcgatggctggtacggtgggcgcgggtggtctgggtgctgtagcaattacctacggctatcaaaatttcgataatacgatcatgtatagcacggtggttttgctgattgtttttgtgcagcttgttcaatggatcggcaatctgtgctataaaaaagcgaaagattgaatcagtcagagtatgaggaaacttatgctctgatttttttgttgttttaaattgaaaaacagctgtagctgagatagctgtcggtagtaatatcaggtataatgaaagaacgatattttttaggaggaaacatggaaaagtcgaatcagctcaaattgaatctacaatatgtcagtatgcaggttccttattggatggggtattcggtattgggaacgtttacttcggtgttcttgctgtcacgtgatttcacgaatggtcagatcggaacagttttgtcgctggccaatctagttgctacggttgttcaaccattcttggcatcctttgctgatcgaatgactcggattcgtttgtctcaattagcggcagggatggcgttgctgttagtcttattttccagtatattgctggtgctacctaaagcgttcttagtcattgcctttatttacatcctgctttatacctgtctggtgcttttgcagccgctaacgatttccatcggaaccttctttatcagtcgcggctatgccttgaattttggtgtggcgcggggacttggctctttggcttttgcggtagcggcggcaatcactggagttttgatcgaacggttttctgcaacgattatcctatttcttttaatcggaatttttcttttctttgcacttgtaacattaacgattgatacgcgcaaggatggcgggaaatactcggagtcgatcgtgccgaagcatcttcaggagactcatgagggagaaccgataggcttattggaatttgcgaaaaagtataagcgctttatgctgctgctagttggggtgtccttgttatttgtgtttcatacgattacgaacagctatatgtatcaaattatgcagcctttaggaggaacagaagccaatgtaggttcgtctctttctatcgcagccttgagtgagctgccgacaatgtttttcttttcgtggttattacggcgtttcaagatccattccttaatgcgttttgcggccttcttcttttcggtgaaggcattgctgattctgtttgctggaaacatttttctgattaatgccggacaaagcttacagatggtaggatttgcgatgcacaccatggcatcggtttattatacgaatcaaattattccgcaaaaggatctagtcaagggacaaaccttgatggccacagcgaattcgattggcgggattattggagcctttgccggcggacaaattttaagtattttatcggtttcggcaatgcttttgatcggcactttgatttccatcactgggacattgattgtgtggctgtcggtagaaaaataagattgagagaagcgtctatttccaatgggggaataggcgttttatttcgttttcttttttatttgcgatagagtgaaatacgtaatgatcaacacaatcggaggcggcttatgaaacgttatcgttactatttgtttatttttttgatcgctgggctgtttgttgttccacagctttggacgcagaaaatgattttgggggcggatgccttattccattacaatcgtttttatgaaacggccgagcaaatcaaaactgaaaattttagttatttcatttcgcttttcggctttcagaaatctggccggatcgtcaatgcggtgtatggaccgctgttttcttacttgcaagggatgcttgtcttacttgctggcagctggtttcattatcaggtactttcgaattttttagtctatttgctggcggggtgttcgctatttaaattactgacctacgacaaaatcagggaaagcaccgcatttctaaccgcaattatttttatgactacctatggcattaattattgggtcttgaatcaaggctttaccagctggggaacgagtcttttacctttgtgcttgatcccgctggtggatctgaaaaatcatcatttcccgattgttaaaatagctttgagtatggctgtgatgacccagattcacaccctgacggcgatgatgctgggattgatttattttccattttttattgactacgcacgaaagcaatggggcagagcgcttcttgaattgggaaaaacggtgggcttgtatgtctgtttatccatcaatgtttggatcagcttatttttgatcaaccggggagatcaattgaagatgccctttaccaatccagaaatgagcgaaaaagcaattgatctgggaggtgcctattggctacactatcctgggaatttgcggctattactgattgcaggcttacttcttaatttggtctattggcataagacgcgacgctttacgaagcagctattgatttttagcggcattttctttattttttcgacaagtctaattccttgggattggctggtcgctcatcaggttccgttgatttcgttgatccaatttccttttcgatttttcgcgccatttacggtcttgtttctcttttgtttagcctccttgtttcaggatttagccgggaaaagaattctatttggtggattacttttactaagtgtaatcagtatcggacaaagtctgcagctgcttacacatgacttgaatcaatgggataagcaatcgttagcgagcaagcatacgtttgtccgtgtttctgaagcagcggctcgaaaaagtttttattcaaaggatttgggaaaagcattgaaggcggtagaaaaatccagtccagattatttaccgatttatcataatgatacgaaaaataaatatgtcagctatgaaaagcagattctcgataatcagacgaacttttctaagacagttaaaaatgatcaattagtgctttcttggcaagccaaagaagcgggaaggattcaattgccgatcgtcgtttatcaaaatactaaattaagtaagaaaactcgagaaatcaaaccactgacgctgtctaacattggcgtacctacgattaagcaagtagctggaagaaacacggttcgtgtacgatatactcccccatgttatattgcagttgtttttgctctttgcgggctcagctggttcacgacatttttatggtgtctgtatcatttttttgcaaaaacaggttaactttggctttctgacagacgatcaggtaaaatacaatttacaatataagaggtgaagaaaatgacaaattacaataatgaaaaagatcgacgcttgcgtggctcaatggcccctaaaaccgaggaggatgttgcgttggcaggtacgaactccagcgaaaccgaaaataaaccggagtcattagctggcagcaattctggtgaagaaaaggagattgcgcgatctggctcaaatgctgtagaggaagaagagcctcacacttcgttaaaagatgaagccaaaaaaatcatgaaagaaatcgaagacaaacttgatccgaagaagtaatgagaaaccatggataattatttagaaatttatgcgcattggtatccacgtagttacgggttaagtgattatccgatggaatgtcatgtgacctattcaggagcagaacggaaagcactttttgaacaattgactgaggcacaacaggcactggttaaccaacaaagaaaatatgaggttcgctcgctgtttttacaaaagcagtatttgcagacctccgattgggaatttgtcgcgttgaatactgatgatgagtacgaacgaggcgttcacagccaattaaaatgtgcctgtggtcgtccgttaaaatatcaatttgtcattgagtcaaaaagtaaacagcaggagattcgtttaggaattcagcattttaaggatcatttagggatttcgcagcaggtagcagaagagatcaaaaaaggcgtggctcatgtagatctagccttagatgaattgctttggttgacggagaagaaaattccttttccggaggatttgtggcaacgttatgtttttgctttttatcgcaacaatacgctgcgtcgtccgctttctttgaatcaaaaactagccgagcgagtcgtctgttttcgaaaagcaaatatgccgcttttcataggcgattacctgagtgtagtgacagagattaatcaggttgatcgtgaagtttttgatcgtcaggagaaaaatttcttagcggacaaaaccgtcttcgaagcttatttggctgattttcagcaggatatccaagcaccaatctatttggaacgaaccttttgggggcgtaagctgacggattttattcacttggaccgctatggttctgaaacctatgaagaagcaaagatgcgctatttcgatgatttgttgtctttttttctggcgttgaaggataagagcaagcttgaccgaaagatccacagctttgagctttttcatcaaaagaaatatggcaacgcggaattaattacattccttattgcaaaatatcagcaatatcaatttacacaaaattttttcttagcgattccgaaggtttatcggatcggtatacgcaaagcaatcaaacgaaagcagaaaaaataaagagttggttcgagatgaaccaactccttatttgtctaaatgattattgagcttgtattgcaacaggacttttgttttctggatcaaccttacatggatcagaaagatagttttttcgacgaatatagttgcctcatgtagtggattcttttttacgtgatttcagaatcggctatgcgaggaagaaaataaagagctgcccgtttttctatcctatatccttacatctgccgaataaagccaatcttctcctgaatggaagaaatttcctcttcaattatgtcaagaaacgcagtgatttcttgcttttcctcttctgagcaaatatccttcgtattgattttttcaaagtgctcttgcattgttttcaggttgatgaggctgcctgtaacatgcatttttttgttgatattttcaatagagttcaaaatcctactccctttcctgagtagcatcctgcgtgaaacgtggatcatggtttgatataagcatagccctgtgcttttaaatctatcaaatctaaaacgcctgcaggaacgacaacaacattctctggcagttgatcctttgttatctgattggcccgcatcgcattattgcaagcgtgaaaggtcacgccttgggtcgcaatgaacgtttgattttcagtcgcaagatacccgttaatcgcactgccattaattaaaacaataatatctattttttggggttctttcaacaagtttttaacattattagcagtttcagtccatttttctaattcatctatatggaaaacaaccttcattattacaccttatttcttaataatcatatttatagcttgttccagcttttgtgcctggtcttctggatttttgtctggatgctcaaaacagtttttcagattttcagccacgatcatgcccatcacacgatcaatactagaacgcacggcacttaactgagtaatgatatcgatacattccttttcctcatcaatcattttttgtataccgcgaatttgcccttcagttcgttttaaccgattgaggatctttttttcttctaattccatctactaacacttcctttgtaaagtctctctgtctttaatatacctagctagggtataactcgtcaagtagatcgtttttaaagtattttttggagaaacagaatggttgacagaaatcattttactatggtaaaaataccctatgaggtatattttgaaatttaaggagaagaatacatgtttaatttatttcaaagaaatccagctatttcaacaagtgaattggcggaaaaattaaaggattcaatcactttgctagatgttcggactccggaggaataccgtggcgggcatattgctaaagcagtgaatgttccattgaataagatcaatcgttatcaaggaaaagaaaagcaagtatatgtgatctgtcaatcagggatgcggagtaagcaagctgccaagctgttaaaacaaaagggctacgaagcgataaatgttcaaggcgggatgaatcgctggcaaggtccaactagagggggaaaataaaatgaaaattattattgttggtggtgtcgcaggtggcatgtccgcggctacacgtttgcgtcgattgatggaggatgcagagattattgttctagaaaagggtccattcgtctcatttgccaactgcggattgccttattatgtttcaggtgaaattgctgatcgcgatgcgttgctggttcaaacgccggaatcgttaaacgcgcgtttcaatttggatgtgcggccttttcatgaagtgactgctatctcttccgaaaacaaaaccgtgaccatcaaaaatgaagaaggaagctttgaagagagttacgacaaattaattctatcgccaggggcaaagccattgattcctgaaatgtctggattagcagaggcgaccaatgtctacagcttacgcaatgttccggatctggatcaaatcatgactgctttagaggataaaccagcaaaagcaacagtgattggcgctggatttattgggctggaaatggcagaaaatctgaagtcccgagggttagaggttacagtaatcgaaagagcccctcatgtgttgccgccgttagatgaggaaatggccgcatttgttcaaaatgaattggttcgcaacgatatccgagtgataacaggtgaatctgcacaaagcttcagtgatcaaggcaagaaaattaccctgactaatgatgaggaagtggcttctgatctaacgattctttctgttggggttcgaccagaaaataccctagcccaacaagctggattagcaaccggcttaggcggcggaattgtagtggatgagacttatcaaactagcgctcctgatatttatgcagttggtgatgcgattgtagtgaagcagcaggtcagtggtgaagatgcgttgatctcattggcctctcccgcaaatcgtcagggacgacaggtagccgatgtcattgccggattggcgcgtacaaatcgtggaagtattggtaccgcgatcgttcgtgtatttgatcttgcagctgcatcgactggtctgagtgaacgtgtggttaaacaattaggactcaattatcaggttgtccacgtttccggaaaggatcatgcggggtattatcctggagcaagcgatgtcacactgaaattagtttttgaacctaagacagggaaaatctatggcgctcaaggtgttggcgcgaagggtgtagataagcgcatcgatatcttagcaacagcgatcaagggtggattgaccatttttgatttgcctgaattggaatttacttatgcgccgccatttggttcggcaaaggacccgattaacatgctaggctatgcggcaatcaatctggcagaaggaatcagtgattcgattcaatggtatcaattaaaggaagaacagaaaaacggcagtcaattattagatgttcgtaatcctggtgaattagcaaacggttgttttccaggagcaatcaatcttccgttgaatcaattaagggaacgaatctcggagctagattcaacgaaaaactatgtcgtcagctgccatagcggattaagaagttatgtggcggaacgactgctaaaacaaaagggctttaatgtaaaaaatttagatggtgcatttgcgctgtataaaacagtcagaccggaggaattgatttatgaatagttcgattggaatgagtgacttttaccatttgacaaaagagaaaaatttgcggatcattgatgttcgggaaacctatgaatatcaaatgggccatgttccttacgcaaaaaatcttccattaagcagtttaggtaatcaagcaagtgagcttgataaggataaagagtactatttgatttgccaatcagggtcacgatcagataatgcctgtagctttttaagtaatcaagggtataaggttattaacgttttagggggaacagctgcttggcctggagaattgcagcggtaattttcatttggttttaaaatgataatgaagagaaacaccagtttaattgataaactggtgttttttttttgaaatctaaatttattcatttttatatattgacaaaatgaaaacaaatgataatataaaggtgtaaataaaaacaaaaaggagcaaacaaatgatcgagttagagaagttagcgaatatggtggatcacacgttgttaaaggctgatgcgactaaggagggcttcgagcaactttgtaaagaagcagatgaatacggattcaaaatggtcgcgattaactcttatccagtagcgatgtgtcgggagtttttgaaggatagtaaggttcatgtaggagcggcgattggctttccattaggacaaacaacgattgaaacaaaggtttttgaagtacaggatgcaatcaaaaatggggcagatgagattgattatgtaatcaatctcggcaaattgaaggacggtgacagtgagtatattcgccaagaaatgaaagcaattgtgaatgcttcacgtgaaggaggaattttcagcaaagtcattttagaaaattgctatttaacggatgcggaaaaagtaacggtttgtgaaattgctaaggaagtgaagccagattttgttaagacgtcaacgggttttggtacgggcggcgctaccgtagaagatgttgcattaatgaaaaaagttgtcggtgatgaagtaaaagtgaaagctgctggtggcattcgggatttggaaacggctttaaagatggttgaagcaggtgcggaacgcttgggaacaagttcaggaattaagatcatagaagaatacaaaaaaactaaaaacagaggagtagagaaatgaccgaaatccgcgatgtattgaaaacagcttttattaaccttgatttgtcagcgacagagaaaaaagcggcgatcagtgaactagcgggcacctttgtagcagaaggtgttgttacaaatgagagcgtttacttagaagccgtaatgaagcgcgaagcagagagtacaactgggatcggctttggtgttgctattccacatggaaaaagttcagccgttactgaaccttcattggcctttggtcgaagtcaagctgggattcaatacgattcaatggatggccaaccggttcatctgatgtttttaattgctgtaccagaaacctcaaatgatgagcatttaagaattcttagtaagctttcccgaaaactgatgcatgaggatgtccgtcaaaaattgatgatcgtaggcaacgtagaagaaatctatcagatttttgaataggaaagggtggaaaaaatgaaaattgttggaatcacatcgtgttcgacgggaattgcacatacctacatggcggcggaaagcttagagattgcagcgaagaaacgtgatattgaaatcaaagtagaaacccaaggatcaattggtgcggaaaatgttttgactgagcaggaaatcgcagaagctgatgcggtcattattgccgctagtacatcagtaaataaggatcggtttaatggcaaacggttgttagaagtggatgtgacagaagccatcgatcatccggatgatttattcgatcgtgttccgaatgcggcaatctatactacttctggtgaggtcaaaacggaggcaaaagcagaaaaaagcggaatctacagtcatttgatgaccggtgtgtcctacatgatcccctttgttgtggcaggtggtatctgtattgctttagcctttgcttttggtggaatcaatgccaaaggagacttggctgcagcaatcaatgaactaggcggcatcgctatgggcttaatgtggccgatcttaggcggatatgttgccttttctatcgcggatcgaccagggttggttcccgggatggttgctgggatgatcgcttcgaatatgaatgcaggttttctaggggcattattaggcggcttcttggctggctatacggtgcaattattgaagaaagtgttgaaattgccaccagccttttctggactattaccagttctgattcttccagtgatctccgtattatttgttggacttattatgaaatttgtcgtagggattccaattaccgcattgaatgaaggaattaccaattggctaaacagcttgtcaggaatgaactcggtgttattgggtctactgcttggaggcatgatggcaatcgatttggcgggtccaatcggaaaggctgcgtacttctttggagtggcatcattaaccaatctggcagtcggagaaacaagtacagtcatggcagccgtcatgatttctggaatggtaccaccgttagcgatggctctttcatcaactgttttaggaaaaggtttatatagtaaggaagaacgtgaagctggaaaatctgcttgggtcttaggtctatccttcatctctgagggggcgattccattcgctgcggcagatccgattcgggtattggcttcagtaactgtcggctcagcaatcacaggagctttatcgatgattttcaactgcgggatcgcggttcctcatggcggctttttcgtcttcctgattccaggagcagtcgagaatgtcttgctatatgttttagcactagcgattggaacagctatcagcggatttttagtaacagcagtaaaagtaatggcgcagaaaaagcaagcggctaaggagtaatgattggcatgtcagaattgattaaggtttgtttgataggtacaggcagagcgggaatgattcatgggaaaaattttgctcgtagaatcgagaatgcaaaattgatcgctttatgtgacccatctgaagaaagtttagcagcagcgcaaaaggaagtagattgtccttatatttacaaagattatcgtgaagtgatggctaatcctgagattgacgccgttgtggtcgtgacgccgacagtctatcataaggaaatcgcactagctgctgctgccgccaaaaagcacattttttgtgaaaagccaatggcgatggatgaggctgaatgtctagaaatgatccaagcagcagcagaaaatcaggttaaattgcagattggcttcatgcggcgctttgacgcgagctttcaagaggcgaaaaaggtcgtggattctggtgcgattggtgaggttgtcttggtaaaatcactgacccatggccctagtgaacctaaaccatggatgtttgatattcataaaagcaatggaccaatcggtgaggtcaacagtcatgatctagatactctacgctggttaacaggtagcgaagtaaaaagtatttatgccaatggcggaaattatcgttcgccggaagtgcgagctgagtatccggattactacgataccgtagccatgaatttaaaatttgcggatggcaagctgggactgatcgatggtgcacaatatgtccaatatggctatgacgcgcggacggagattcttgggactaaaggcagcattttagttggtgatcaaggaaagcacaatatcgtggtggcaacgagtgatcatcagttgacccgaccaacgatgcacagctggatgtatctatttagagaagcatatgtagctgaggatcaggcttttatagattgtattttgaaagatacagagcctcagtgtacgggaaaagacggcttaatgtcggttcgcttagtcaatgcaggcttgacttcgttgctggaaaatagaattgttgaggtggaagcataaatgaaagcaatccaattattaggaaaagaacagattcaattaaatgagttacctaaaccggaaatctcggaaaaagaagttctaataaaggtcaaagcggcgtctatctgcgggacggacgtgcgaatgtataaaaacggctacccgactgcaagtgaagagaccccgttaacactaggacacgagatttcaggtgatattgtcgaagtaggagccgcagttgatttctatcaagtcggcatgcgagtagcgattgctcccaatatgggctgcggtatctgtgatcaatgcgttagcggcaatacgcatttatgtgcgaactatgaagcgttcggcatcaatctacctggcggcttcgctgaatatttggtcattccggaaaaagcggtgcgccaaggaaatatctcactgattccagatgaactgtcttatgaagaagcagccttgatcgaacctttcagctgtgtcttcaacggacaagaaattgcgggaaacaaaccaggagataatgtcttgattattgggtcaggtccaatcggaatcatgcatgcgatgttggctcgagcacgtggagctggaaaagtcatgatgaatgatttgtctgaagctcggctagctgatgcgaaaaagatgcttccagatctaatcacactgacttccgaaaatttacaggacaaaattttcgcggagacgaacaatcaaggggttgatctatgtattatcgcagcaccagctccgcaggctcaagaagccagcttcaattatatggcgacaaaaggacgctgtctcttctttggcggattaccaaaggaaaaagaagaggtgcgattgaatacgaatattcttcactacaagcaattacgcgtgttcggctgtactcgagcaagtctaatgggttatcgaacatcggcacagctagttgccagcggtaggattccattgcaggacttgatcacgaagcgttatacgatcgatcaatttgatgaagcgttagaaaatgctcagcatgcaattggcttaaaaaatgtgattgttttcaaatagtcattttagtttcattgcttccattttcagtttcttttataatgaaacaaaacgcaaaaaggtgataaaaaatggacgagcaattgtatgcagaagaaagaaagcaatcaatcgtaaatatcgtaaatgaaaaaaatcggatgcaggttgctgagttagcagatttattcaacgtaacgggttcaacgattcgcaacgatttgcgagagctggagaatgaaggcttagtaactcgaacacatggcggggtaatcaagcgtgattttcaacgcagtgttgagatcattcccaaaagccgcgaatttaccaatgaaaaataccgaatcgcagaacgagcggtgcgcttgattgaagaaaatgatattttagcgattgatacagggacttcttgcagagcttttgctgaaaaattgatcaacagttccttgaagcgtttgacgatcttgacctatgatttggagattggcttgctgctaagtgaaaaaaccaattatcaagtacaagtcattggcggcgcgattcgcaatggttatccatatgtatcaggcagctctgtggcacttggtttggctggcttttcagtcgataaggtcatcttagggacgacctcctttgataaaagctatgggtattcgacaccaaattacgaaacagcagagatgaaaaagagtttgatgaatattggacggataaaaatcgtattgtgtgagtccagcaagatcaatcaacgcagctttaagcagtttgctaagcctgatgaatgtgattacttaattacagatgcacagattaccagtgatcagcagagtgatatcaatgcgttgaatatcaatttattaatggtatagaagaaagcctgtttactcccgtatcggaagttaaacaggctttttactatgcaaacagggaaccaataaaataaagaacagggtaaatcaccatgattgcagacattgcttttaagacgattggaaaagttgtctttttatcttgcagtgtgcggtattttttcaagctctgccaatttttaggaaaaaggaagagtagaaataggactgtccaaggtgctaaatcagtgataaccaagatagccaaccagataaagctgaatacgtagatggttaataagagcttcacggcggctggtttgcctaaataatataccagcgttttccgatggttttcgatgtcttcctccaaatcacatgtgttgttggccaataagttattaaacatcatcaataccagcggcaaactgatcaagaaaaccttgccaatcatcgcaaacgtgatgacctgcgtttggtaaaccgctaaataatagctcaccacagtaataaagaagccacttgccgtaccagttagtgcctcagcgattggcaggctgtttaaaggccgtcgaccataggaataaaacaacccaatatagaaaccaatcacacctaaaactccaattacccaatttgttcgccaaactaatattaatcctaatatgaaagaaataatcagattaaatagataaaagtttcgcacaaaacgcagatccaaatgatcgcgtccaataatattggtgtgctgtttgtagttttcatcagaagcatttcgataatccatgtagtgattaaaaacattgacggtgatatgaaacataacgatgatcaaaataaataaaaagaattcaggattcagtgagctgttaagctgaaatttcgcaatcgcgtagccgagtaaaataataaaaagatttaatggagcagtataaatttccgacagttcccaaaattgcttaaaggttagttgtttcaaaatgattctccttttttaatgtattagtcaaaaaatcagttttcgatcaagtagaagataaaaactagatcaaccattttcaaaaatagcgagctttgagaattttgtccaatagtttgtttaagccaagggaaaggttttcaatagaagtcgttgttttttttattaatgttcgtgttttaatctatttatatattattgtttacttattatctgctttattatatgattatcctcgttgtttggaaaaacaagctattattttacgaacatttttagaatataggaggagtatcatgaaaggaaaattaaattcctattttgaacttgaaaaattgaacactacagtaaaaagagaaattttggcgggttttaccacctttatttcgatggcatatattctctttgttaacccaagcgtattgggcgcgtcaggaatggacgaaggcgcagtctttactgctacagccttggcaagtgcattagggtgtatcctgatgggcgtcttagctcgctatccgatcgcaacggctcccgcattagggatcaacgctttcttcgcttattctgtctgcattggaatggggattcgctgggaaacagcgttagctggtgttttcgtggcatccttgatttttatcttaatcactatttttaaattacgggaaatgatcattgatgcgattccagcagacttgaaatatgcgatttctggtgggattggtttattcatcgcctttttaggattgagcgaaggcggcatcatcgtggcgaataagtccaccttggttgggctaggctcaatgagtgtcggcaccacttggttaacgatctttggtttgatcgtgactgcaattctgatggtacgtcgcgtgccgggaggaatctttatcggtatggtggcaacaacattattaggattagtcacaggattgattcaagcaccaacacagattatttcggcagcacctagtttgaagccaaccttcctagttgctttaaagcatgtaaaagatatcaacacgcttcagctttgggtggttgtattgaccttcttattagtaaccttctttgatacggccggcaccttagttgggttagctaatcaggcgggctttatgaaggacaataaaatgccgcgagtcggcaaggccttggcatcagattctacggcaatgttagctggatcactgctaggaacctcaccagtaggagcctatgtagaatcctcagcagggattgcagttggcgggcgttctggattaaccgcgattacaacaggggctttctttatctttggcttgtttttctcaccactgctgtcagttgtgacctcacaggttaccgcaccagcgttaattattgtaggagtattaatggctcaatcgttacgtgaaattaaatgggatcaattagagatcgcgattccctcatttttgattctgattgggatgccgctgacttatagtatttctgacggaattgccttaggcttcattttttatccaatcacgatgattgccgcgaaacgtgggaaagaagtttctccgatcatgtatggactattttttgtctttatcggcttcatgtggatactaaatgtaaaataaaatttaactgagttgtcatttttatttctatttctccataaagtggaaattttgtttttaatcatattgtcttgttaaaggacttaaacgctatttttttaagagtattagtcttactttaagtaatattggatattaaataggtagcgatagcgttcttttggttatgactttcatcattaaaacggttagcatatatttttattatttacaaattaaaaattgacctaaaattaacagtataatataatctatctatataaatgtttttctattttaaggcattaaatgatatttcgggttaattttcggattttattaaggtatgccttcagtgatgctggatagggctattaatatggaaaaggtgttcgctgggaaagagcaattttaaaggagatgaaggtatgcaattattacttctaacaaaggttccgctatatgaggaaaactttgagcgacaattgaaacagttaggcaacgaggtatattgttccagcaatatgttaacaatgttaaaaagaaattcgtttgacaaagcttttcttactcaatttgagggaatcatttttagcgagaccatctatgatatagaggcttatgaggtaatcaagcaactgccgcaggcaaacatcaagctttttcgtcgagcagcagatagtaattttgacaaagaaggctcttctccttttgatgcgtggattccaatgaattctgatttggaacgcgtgcgggaaattttattgcttgctgaattatcaagcttggcaagtaaagatgccgcacatgtccagcaagtgtcagtcaaacaaaaattgtctgacctaaatttgaagttgaaacaaaaagagattgtctactatttaattcaggcgggagaccgaaccgtccctcgtgaagaaatcagtcgacaaatttgggagaaagatccaacgaagtctgttttagcaagtctttcgaaggttgtttcaaaggttaatgagaaaataggaaatgagtttggcgaggaagcgattcaaactgtttggggccaaggatatcgtctgaacaaaaagttttttgattatttggaagatgattttgtgcaagagccaacaacgatcgttcgttaaattggtctctgtaaataagtattagcttttttcctaacaatcaatacgttttttgtagctatttatcaaataagaatgaaagtgcttttcgtttcgaatgtgtgaaacggaaaggcactttttttatttatgtgtattcgtaagtgttatgcagcgcattgccaatagtgctttatattaatacattgaaaaatcgtcaaaatattataaaaaattcagacagaataaaggagaatgacttttttagaatttacttataatgaaaaaaaggaaatcctaactgatgaaccaatcaaagaatcattactattaaggaatcagtggatcaaagagtatgtaaatgccatgattaagggcttttttctttagcgagtcatgattatttatttcttatattagaatacgtttcccagtttagaatcgatgtaagatgattaggaagtgtattattgggtaaaataactaaaaaaggatcaagctgctcaaagggttaattgataaatatttatatttaatgaataaaaatttgtttatgttatatttttaaattgagggggattattatttttttcaagaaatatatgaaaaatcaatcgactaactctatccctcggaatagaaaattcagtttttgatttgtcataaatacaaatgtagttagaacatcataggaattaacaggagcattattttgaaggaatgattatcatgtagctatttatattggttttccagaaattattatgatgaatttgaaatatttttgctaaatgtgtaattggttaaaaatttcgatgagcaaaaatgattttaaaaaaaaggtttcgcaaaaagttaatatactgttgatttattataaaaaatattttataattttttaaaaatagatgtataataaaacataaaaattatttatttaaaataaaaataattattatactttttgaattagaattaccttgaagacttttacaagttatataactaagaggattgctgatggctttttgcagatatgttcgagttttcgtaatgttagcaaattcaaaatgataacaattaagtggccaaactacattcgagagtaaatataggatatatctgtttatttctatatgaaggtatcagatggagaataaggagagattttaggagaaatagcgcaaaaatcaatagttagtaaatagaagataagcttctgatggttttgttacgagagaaggttcactcagaaaaagcaagacggttttacataataagtcaaaaaacatacatatagaagcagctatcttttgatcttaatcacaaagaagagagatgagaccagcatgggaaattttgatgtttttagtgtaactgataatagcaaagaacaattgttggataaggttgacgatttggagatacagaacaaggaactcctggagcaaatcgaaaaactggaagggatacgcggtgcactagaggaaaaagtttcagcataccgctgtcgactaaaagaagtgacaaagaagctagaggatcatcctatctttttatctagagatatcgttgtctatcataataaggacaatctagaaaggcgtcgctttgtccttcatagaaaatcaaagcgtcagcaggcaagcgcatgtggtgattcttctagaaaaacgatggagatcaatgatttacaggagaaatatgaacatcttttagaacaatatatgtttgagtgtgatcggagtgaacaattgtttgattatctgtttcatcaggaaaacgatgctactttggaattatttgttaaagcggatgctgcagacacattgttagctgctgcgacaaccagtcgtaagattattcaacaggcagaggaacaggcaaaatatattgagtcgagtctaatggaacgtttgaatagtgtattgaagcaaaagaacaatataccgcaagagattattgatgatgtaaaagagagtcttcgttgtttagaaaactaaatgaactttcgacagtggagttaacgggtgtaaaagtggaaatgagtaaagatgggagtgtaggacgatgaaaaaagtaattattcttactagaaatattatcatcgagcaagagtttcaaaatgaactgcaacgattagactatgaagtttttgtcttaaaagaattttttgatgtggataaacctaattattttgaagatattttatcactatttgatattgtcatctttagtgaaacattgacaaatcaggaatttaatgaaatattgcccattgttttggaaaaggatttgcattatttacggcgtacggatgaacccgtacctaatattgatgaaagccattgtttatcgattgattgtacgctaacggaactaagagaattcttgctgttaagcgataagcgtggagggcatcaagagtcgatttctaaaggactcgtcagacaatctgaaatgaagaaacaagacttagttcttttctatagttcattgaataatattgaaaagaaaattatcagtgcactggcagagggcagcggaaagatcatttccagagatgagctgtgtaataaggtttggaacaacgaagtcagcaaatcgcgtttggtccaaatgtctacggcagtaggaaatattcgtaagaaaatcgctcacgcccacatcgataatgttcggattattacgtattggggaaatggctatcgtctccatgatgttccgaatggcttgatgaatgagcatattaaggaatacagtatgtagttaaaagttaaaagcctcagctttctcctatcacaggaagagggctagggctttttttgttggaaaaaattccatatttttttaggttgctcatgattgaatgaaaaaaatctagaaaaaagtcctccaaatcctatatatacttctccttgtaagaaaagaggtgcctaaaatgatttatcaatattctttgaaatatttttcctgaatcattcattgctaattaattaatgaaaagagaaagaagcgtttctatgaatcagaaaaaattatctttatttggcttttttgcattgacggcttcgatggtcttaacggtgtacgaatatccgacctttgctacttcgaagctgcacctggttttctttttattgctaggtggcattttatggtttttgccggtggcgttatgtgcagcagagatgtccacggtggaaggttggcaaaacggtgggatctttagttgggtcagccaaacgttaggtgagcgatttggctttgctgcgatcttctttcagtggtttcaaattactgttggcttcgtgaccatgatttatttcattttaggtgcgctgtcctatgtattgaattttcaagcactgaatacagaccctttattgaaatatatcggtttactagtcattttctgggggctgaccttctcgcaattaggcggaacacaacgaacggcaaaaattgcgaaagcaggatttgtggtcggtatccttattccgtccgtcattttatttgggttggcagcggcttacttcattggaggaaatcctatcgaaattgctattagtaaaaaagcattcatcccagatttttcacagttatcaactttagtcgtttttgtctccttcattttggcttatatgggtgttgaggcatccgcttcccatatcaatgaattggaaaatcccaagagaaattacccgttagcgatgatcttattggttatcctagccattgccttagatgcgatcggcggcttctctgtagctgcagtgattccccaaaaagaattatccttaagcgctggagtgatccaaacattccaatcattgattttgcattttaacagtcatttaggctggctggttaaagtcattgctttgatgatcgcttttggtgtgatgggtgaagtaagttcatgggtagttggtccttctcgcgggatgtttgcggcagcacagcgtgggctattgcctaactttttacgtaagaccaacacgcatggggttcctgtgccattaattatgatccaaggcgtgatcgtcacaatctggggtgcagtattgacctttggcggcggtggaaataatctatccttcctcgttgcgatttcgttaacggtagtgatttacttggtcggctatcttttattctttatcggttattttgttttggtatataaaaagcaagagttgaaacgaacctataacgtccctggaaaaaaaattggaaagacaatcattgctggtgtcggactactattatcagtttttgctttgttgatttcctttgttcctccagcttccattgctaagaacgaagatcgaacttaccaagtgattttattgattagttttgtgatcacggtagttttaccgtttattatttatgaattgcacgacaagcatggacacacaacgatcgaggagcctgttcacatgaaagcaggagatgtgaatggagcgatctatccagcagctcgtggagaacatcaaattgttcaaaaagaagagcacacattgaaacattaaataaagacatttttaggaggatttactcatgttatatggaaaagaaaatcgtgatgaagcagaatatttggaaccaatttttggttcagaaagtgaacaagttgatctgccaaaatataaattgaatcaagcatcaatcgaaccacggatcgcttatcaattagttcaggatgaaatgctggatgaagggaatgcccgtttaaatttagcgacattttgtcaaacctatatggaaccagaagcagtgaagctaatgagtcaaacgttagaaaaaaatgcgattgataaatcagaatatcctcgcacaacagaaatcgaaaatcgctgcgtgaatatgatcgctgatctttggaatgccagtgagaacgaaaaatttatgggaacgtcaaccattggttcttcggaagcgtgtatgctaggcggcatggcaatgaaatttgcttggcgtaaacgtgcggaaaagctaggattggatctcaatgcgaaaaaaccgaacttagttatttcatctggttaccaagtttgctgggaaaaattctgtgtctattgggatattgaaatgcgggaagtgccattagaccaagaacatatgtcgatcaatttaaataaggtaatggactatattgatgagtatactattggaattgtcggtatcatgggaattacttatactgggcgttatgatgatattaaaggactaaatgacttagtcgaagaatacaataaacaaaccgattataaggtctatattcatgtggacgctgcttctggtggtttttacgcaccttttactgaacctgatttagtttgggacttccgattgaagaatgtcatctcaatcaattcatctggtcataagtatggattggtttacccaggtgtcggctgggttctatggcgtgatcaacaatatttgccaaaagaattaatcttcaaagtcagctatttaggtggggagctgccaacgatggcgattaatttttctcatagtgccgcacaattaattggtcaatattataattttgtacgatacggttttgatggctacaaggctattcatgaacgtacccataaagtagcactgtatttagccaaagcaattgaagaaaccggattgtttgaaatcgtcaatgatgggtctcaactaccaattgtttgttataaattaaaagaagatccaacacgcgaatggaccttgtatgatttggcagaccgtctgttaatgaaaggctggcaagtgcccgcttatccattacctcaaaatctggaaaaagaaatcattcaacgtctggtcattcgagctgattttggtatgaacatggcgtgtgattatgttcaagacatgcaagaagcaattgacgctttgaatcaagcgcatgtggtttatcataaaaaagcagaaatcaaaacatatggatttactcattaaaaagaagcctgaaggaaaattattctttcaggcttctttcgtatggacgagcgagttggttgatctcaatacaggtttgatcgattgttttaggtgaaacaggaaaaattaatgtattctcactgcctaagtccgcctggtaaagtgcggtgtcacaaacgatgactcgtcttgagcaaaagaaagtatcgtccactacttcattcaaggtattatagatcatcgtgctaataagaaaatgatcatccagcaaggcttccagctgtttacgataatataaaaaattgaaatcagaagaagcgacgatatacaattcgattttttcatcaaaggtgtttctgcgcagcagatcgagggttaacgtcattttgcgaatgagattgtcgttccaatgaatagttgtttggcaagcagcagaccatgtttctaagattttttgcaccttttggtaaataaccagctgttctttatctaacagataaatcagatccggctggaaaagctgcatgtctccccaggtagaacgaataaaagggagaaaggcctttttcaaaagtaattcattgtcaggtgagatcgttagagaggaacgtaattcttgcagcagattttcgatttcaggatagcgcttgatatgattttgatacaccacgtcaaaatctttttgcagcaattccaaattgttgcaaagataatttcttgcattgaaaagtgaataaataaaaaatagttcctcttcattagcgcaaattgttgattttaaggttttcaagccttcacgtaataatccaaataaaggtgtttgctgtgcgcagattttgtcttcatctgaaaaagtaatggtcgcttgtcgggcacggtgattgctgagctgaatgcctaaaatgatgatttctcgctcgctttccgggtaatcacgtgcgaaaaagtgttcctcgacataatcaatcaattcttcagcagctgaagcaatcattttattgaatgggatggcggaacgttcaccagtgtatcttgcgatagccaaaagcaagtagcgtagatctttttcaggcagtttcagctgctgctttgaacacgaatagccaagctcatcagcaaaatcaaaaatatctgctcgaagctgataaattttactagtcgacagaaattctttttccgcgatctcagaccagtgggtgtttccaatcaaaaagtcgtttagaacacgcaaaaaatcggagcgccggtaaatccgttgcgttaattctaataatgaataagcgggatcaaaaaatagtttgcaggtatttctggtccgctcaaatgaaataatctcctgtgtgaaagattcttttagagcctcgagatcgttagtaatcgtaggtgtacagacgtttaaacgttcggccatcgcttgtaaagtgatttctttcttttggtacagctgttggcagagataaacctgacgaaaaatatttttttcaatatacctttctagcataaagtacctccttagtaacgacacacatatgattgatattgtataccaatttcgttgctttgaatatttctaggctagagaactcgtcatttttttagactgaaaaataaaataatgaagacggacgcctaaaagggatcacaatgctgattttaaaataaatttaagtatttttatttaagaataattttagttattaaaaaactttagaatagagctgaacttagtaactgacgggttaattaaactattgaataacagtgaaaacctttttttagtgaattagaatgaactgctagaataatgagacaaaatttttttgaaagaaatttttgtcgattatgagagtttgaggggagaaatatttcacaagcccgtctgtattagttctctgtttttcagtcaacaaacggttgtaaattgtatattactgagcaaattctcgtatcaagtagaaactgtcattatcaattacatcatctgttatagtgaaaagtgtaacaggtcatggtatttgataagataattatcattattttaaaaggttttgtagagataagaagtcaaaaaagccctttcttaaaactgattcctttgttataatcattttaaattaatttgaaactatttaacaagggagtgctattatggaaactacaacaatcaaaaaaactgtagaacaaacagaaaatccttgggaagggtttaacgagggccgctggcagcatgaggtcaatacgctagactttattaaacgaaattacacagagtacaaaggtgatgacagctttttagaaggcgcagctccgagtaccgaaaaattatgggacaaattacaagagctttttgaagttcagcacaaacaaaacggcgtttatgatatggacaacgacgtgcccgcgaccatcacttcccatgagcctggttatttgatcaaggaagaagaaaagatcgttggtttacaaaccgatgtaccgttgaagcaagcatttatgccatttggcggaatcaacatggccaacaaagccttagaatcaaacggctatgaagtagacgatgaaatgtctttcatcttcaacaaatggcgcaagacacacaaccaaggtgttttcgatgcttatacagatgaaatgcgcttagctcgcaaaaataaaatcatcacaggtcttccagatgcttatggtcgtggccgtattatcggtgactaccgtcgtgtcgcattatacgggattgatttcttgatgaaagaaaagaaaaaagactggaaaaacgtcggcagtaaagtaatgaccaatgacgtgatccaattacgtgaagaagtttctgaacaattccgcgcattagctgatatgaaggaaatggctgcaagctatggctatgatatttccaagcctgctaagaatgctcaagaagcaatccaatggttatacttcggctaccttgcagcaatcaaatcacaaaatggtgccgcaatgtcaatcggtcgtatttcagcgttcttagatatctatatccaacgtgatttagatcgcggcttgatcactgaatttgaagcgcaagaaatgatcgatcatttgattatgaaattacgtatggtgaaatttgctcgtacgcctgagtacaaccaattattctctggctacccaatctgggcgacattgtcattagcagggatgaacatggacggttcttcattagtaacgaaaaatgatttccgtatccttcataccttaacaaatatgggaccttcaccagaaccaaacttgacagtattgtactcatcgcatttaccagaaggcttccgtacttatgcagcaaaagtagcgaaagaaagctcttcgatccaattggaaaatgacgatctattacgtcaatactggggatctgacgatgcagcgattgcttgctgtgtatctgcgacagttatcggaaaagacatgcaattcttcggcgctcgtgccaacttggctaaagcagtgctttatgcaatcaacggcggcgttgatgaaatgacgaagatgcaggttggtccgcgtttccgtccattagaaggtgacagcattgattttgatcaattcatggaaagctacaaagatgttttggattggttagcagaattatatgtgaatactttaaatgtgattcattacatgcatgataaatatgcctatgaagcaccacaattagcgttgatggatacagatttgaaacggacgtttgcgaccggtattgcaggcatttctcacgcaacggattcattgatggcgatcaaacacggaaacgtaaaagtgatccgtgatgaggatggcttggcaattgactatattccgcaaaacgaattcccaacatacggaaatgataacgacgaagcagacgaaatggcgaactggattcttgaatacttcatgacgcaaatcaaacgtcagcacacgtatcgtgattcaacaccaaccttgtcattgttgacgattacttcaaacgtcgtttatggtaaaaatactgggaatacaccagatggccgtcgtgcaggtaaaccattggcaccaggagcaaacccaagctatcaagatggtaagttcttaggtgagaaaaacggtctgttggcttcattgaattcaactgcgaaattgaactactcttgtgcgcaagacggtatttcagatacacaaaccatcaatccaggcgcattaggccggacagatgacgaagcaatgcagattgacaatctgcgtcaagtattagatggctacttcgataagggaggctaccacttgaacgtgaatgtctttggtcgtgaattgctagaggaaatggacaaagatattgataatcctaaatatgcgaactttaccattcgggtatccggttatgccgtgaaattccgtgacttaacaccagaacaacgtcgcgacgtaatctcacgtacagaccacacaaaaatgtaaaaataaaatattttttagcaaaatagaatttttgaaaggttctgaggctcattatgtagcctcagaacctcttttttaccaaatatgttaaaaattattaataattgtgatttttaaataaaatattagttgattgttctatactattgataattattaagcaagtgggtgatagtgattgaaggagtatgaaagtcaatgggtggtgcgaattgttggtatcgttgcgggggcaatggtctttttcatgattatttatgcttactttggttcacatttttattttgggtcggtcgtggcgaatgtacctgtgggcgggttgtccgttcaggcggctgaagaaaaaattcagcaagaaacaaagcaggtggaaattaagctgaagggggagtatcaaacaatcaaacttcaagtcgcttcgccgtataagattcaaaaggattatttgaagaagaatattcgccgaggagaattcagtctgcccatcaaaaaaggcgcaaaagatcgattagctgaggcaattaaccgcgcctcctttctcgggggaaaagaagcgcaaaatgccaaaatcatttataccaatcaaaaattcgagatcaagtcagaaaaaagcggcacagtggtagattctacgcgactgcgcaaggaactctgtgaagcctttgaagaaggaacactacaaacagaatatgagttagccaattattatcgagaacctgagattacaacgcaggagttgaatcggcaaaaaatcacccagaatttggaaatggtcaggaagcgtaagataaaactaaagctgaacaaacaaaccattcccctgactgaacagctgttggccgcttcagtagatgatcagggaaattttgaccaagagctgataatagcgtgggtagcagatttggaacgggaatattcaacgatttaccaatcggtggattttacaaatgtccacgggcaacatctgcgttttaaaaatgtggggaattacggctggtttattgatattaaacaatcggcgaagagaatcgctgaaaaactaaaggaacccgatactaaagttattcaactggtactcaagggcgatacaaaaaaacaacccctacatgttacaaaaaactacatagaagttgatttagataatcaaaaaatgtactgctttgacaatggcaagctagtagtcgagactgatgtgattacaggccgctacaataaaggaacggcaactgttcccggttttcatacggtgatggacaaacggcgaaacgttgatttgagcggtgtcttaacaaatggggatggtacctataatgtgcctgttgattattggatgccgttactaagctatggtcagacgattactgagataggtcttcatgatacagatcataagctgcagtatttcggtcagcccggcgcctttaaaacggatttgggaagctatgggtgtgtcaatacaccgaaatctgaagtggcgaaaatttatgagtatagttacatcggaatgcctgtttttatttatggccatgcttatgatgacgcgccaggtgaatgggacaaaccagtagagtatggaacagaaatctaaaacagaggttgtaccagaagttatttgtggaacaccgtttattcagaaacaggagccatgacaaatttttggtcacggctcctgttttttattttttgcaagttgtaaaaatgatttcctgcaaataaagcagttcaagctttaaaagataatattgtccttgatcagctcgatatttttgataaatattttatggtcatgcattttgatcgcaccacaggtttttagttgatgcatgatccggctgacgctgctggcagcattgataccgcaaaaatgggcaatttcttcgttggtcactacgaagtcgatcaagaccccatcttggtattctatgccaaatttgtcgtaaaggtcatagatttggctgcatacagccccaaatttgccattcattaacatttgctgagttctcttcatggatttcatcagccgttctcggtaatagtttttgacatagatttggagttcacgattttgattgatatctttccaaaattcaacgcggtcaatctggtagagttcggccttttcggattctatccgaatattgaagggagcgtcgatgaattgagagtactcgtcctttaacaatgacactacttcgagttcattgatgtattccaaattgaattcgcgaccatctctggaaacgacactcgtcttgatgacgccgcttttcaaaatgtacacatgatggtcctgaattccttcatagagcagatactttttgtattctttactaacgatcgggaattttttttgttctaagtagtttgttaaagctgtattatccaatttttctttattccttccatgaattgttgaaattttcattgacattttatcacaagtagacgttttgtttgattaaaaggctagttaaaaaagatagtaacaaatgttaatgtccttttttgttaaaaaaaatttacgtctttttttaatatgaaagctgatttcccgctgttttttctatccgtataatcaatcaagtaagtcgaacaacccaaagcgtgatcagaaaatttgaaagaaagagaagtgtttattatgaaaaaatggacaagcgcaatgattgaacgattggaatcagcctatcaggtacgatttgaaaaagaggcggtactggtctttttaaatgatgcgtatcaaaatgcgttgatgttgaggagagattattcgtttgaaaatgacgaaagtctggccgcctttttatcagcttttgactatacgcgggatttatttattagtcaggcggtggatcgttatccatcaaattacaataaggtcgcagaaaaaatctcaaccttaaagaagttaaatgagcgtatcgcatattaatgagagtaggtaatgaaaattaaggaagaaaagttattcaataaaggatttatcaccatcacgattatcaattttgtagtctttttagtctattactgttttgttgtgataacggcaaaatatgcaacacaaagcttagggtcaaccaccgctcaagcgggcttcgctgtcggtatttatattatcggtacactactggcacggttgtacattggcaagaaattggaattattcggccgacgagcggttttacgctatggggcattgttttacttaatcacgactgctgcatatttgatcagcaccaatatttttattttagatggcgtacggtttttaaatggctttggttacggagcggtttctactgcggctaatgcgatcgttactgcttatattccagaggctaaatatggggaaggaatcaactattatggattgagtaccagcttagcagcagcgatcggaccatttatcgggttactgctgctaccgatggttggttttaaagcgatcatccttcttgcggtgattctcgcctttgttacgatgctggcctgcttcaaatttgaagtaagtaatatcgaattatcagaggagcatcgtgctcgaatcaacacctttagcttagaaagttttgttgaactgaaggttttatttattgcgggaatcgcctttttgattgggatcgcctattccagtgtcctaggctttttgtctatttatgccgatcaattgcacttagttacggcaggcgcctttttctttgtggtttatgccttggtggttactctcacaagaccgatgtctggaaaaatttttgacaagcatggagaaaattctgtgatgtatccaagctttatttgtttgacgattggcttgattcttttagccttcacaggcaatgctgttgtcttgttaattgccggagcgtttgtaggtttaggctacggtacttttatggcaaatggtcaggcggtgaccttgaagctggttgaaaaggctcgaatcggtgtcgcattatcgacgtacttcattggtcttgacttaggcttaggagtaggaccttatttattaggagccattaaaggaatcctagggacttatcagcatatctacatcttctgtgcgatcattccattggttgtagcgattttatacatgattttttatcatccaaagaaatctgtggatgcgtaagaaataggaacaaaaaaggctgtgccagcttgctttggcacagtcttttttgttaaattttattcagtttttcatggatgacttcggttaaatcataattctggtttagtttggcataataatcggcttgctttaatagttcgattttatcgctgatgttttcttgaatgatcgctttttcgaaaaatagctcttctaatccagtagtcacgtttacctctaataaggtttgaataccttcgtcgcaaagtgcattagcttttttttggttgccgcgatcggcgtagaagcaagctgcctggtaataggatggacctaattttaattttgtattcattttttcctccatttgctcagcgcgttcaaaatagatgcgtgcgcgttttttttcttcgtttacttgataacaggtggctaatcctttaagtactagcagttcataccttttttcatcacgaaaaaaggtataggcgcgttgaaagtaatggacagctttttttgtgtcgcgcttgccaaataaatttgcgtaagcgcgaaaatacaatagatgaccaacgattcgtgcattttgatatgaaattttcttgccataggtattcaataaaaacaaaacactagagaactcttgacgtagatgcagacaacgaacaatatccaacaaagaagtttccgttaaaagaactgtatctgggaaagcatgatggtatggaacatccagtttcatacaaagatcgagaatgacttctaaaatgcctatgtttttgtcttcgatcaactctaagtcagccggagaacaaatcgttttgaagtcttctcgcgctatacccgccttctcgcgcttttgtctgatgatatctccattcacgttcatgattgacctcctacgaataacgctttcatattaattctaaagtctttattagaaaactgcaataataatattcaaaaaaacccttttttttaatttattttcctataaattgaattgaatgtttattttatctttgttatatcatttatttaggtcgaaaaatcattttcttaaataatcgaataattataataagagcggctggaatcagaggggattgaaaacaaaagaacgcttgcgtttcaaggcaaatatgataaactgttaaaatactatgaaaaggaagagtgattgtgatgagaaaaatgaatgttgcaattgtcggcgcgactggcgcagtaggaacacaaatgattaaactattagaaaatagcaccttgcccattggcactgtgaaatttttggcttcgaagcgctccgctgggaagcaactttcatttaaaggcgaaactcaaacaatcgaggagctagttccagattcatttgaaggaatcgatctggccttattttcagcaggcggaggaatatcggccaaatttgcaccagaagcggtcaaacgcggagcggttgtagtagataatacgagtcatttccgaatggaccctgaagtaccattagttgtgcctgaagtaaatcctgaagctctgcgggctcataaggggatcattgctaatcccaattgttcaacgattcaaatgatggtggcgttagagccgatccgacaggcttatgggttaaaacgtgtgctagtttcaacctatcaggcggtatctggtgctggaaatcaagcaatggaagagttgaagcagcaaactcgcgactttttagctgaaaagcctgtagatgagtggaaagcagatattttgccttgcggaggagataaaaaacattacccgctggcctttaatgctttgccgcaaatcgatgtatttaccgatgatggatacaccaacgaagagtggaaaatgatcaacgaaacgaaaaagatcatggaggacgattcgattaaggtttcagcaacctgtgtacgcattcctgttatgagcggacactctgaatccgtttatattgagactgagaaaacggcgacagtggatgaaatccaagaagtcattgctaaagcgccgggtgccgtattagaggatgatccaagtcagcagatctatccgcaggccttgaattgtgttggcaaaaaggaaacgtttgtcggacgtatccgcaaagatccagatgaggaaaagggtgtccatctgtgggtagtttcagataatctattaaagggtgcagcttggaattccttgcaaattgcggaaacaatgtatgaaatgggacttttaaagtaagtgaatagtcaaattctcagacctgtgacgtttggtgtcgcaggttttttttgacatcaaaggaaggattaaattttacgggtcgatttgaagacggaacagcttaacgtgccctacgatgaatatcctcacttgcgatacctggagtagtatcacaagtgaggatatgtttggctgaaagtttgtttttaggtgaagttaatacaatcagcgtgttggtagatttatttagaaaacgaaacggcttttatttattcgccaaacgttcttttaaatttattttctcacctcgctttcgtagatcataaaattcaccgatagctgtgaaaaataaatcatttgaagagttaactgctgtttcaacagaatcttgcacgacaccaataatgaaaccaacaccaacgacttgcatggcaatgtcattagaaattccaaacaggctgcaggctaatggaattaataataatgaacctccagcaattcctgaagcgccacaagcagacaatgcggataatacacataaaattaacgttaaactaaaaggcacatcgattcctaatgtatgaacagccgttagggtcatgatagagatagtaattgccgcacctcccatgttgatggttgcacctaatggtaaagaaatagaatatgattcttttgttaaccctatgcgttttgccagcatcatattgattggaatatttgccgcagaacttcgagtgaaaaatgctggaatagcactttcctttaaacaaaaccaaacgagaggatacggattttgtctaattagtacaaacgctactaaaggataaacaactaaatcaacaatcagcattgtccctaccagcaagagcagaagacgcccatattgcattaatccagcaagtccagttgaagaaactgactcaaagactagaccggcaatacccaacggtgccatagcgataattagctgaacaacccccgtaatggctagagaaaattcatcaataacttccttaacagagttttttcgtgtacgtaaggcaaaaccaattagagccgaccaaaatagaacgcctaaataatttccctcaatcattgcctgcaatggattttgaacaatgttatttagaatagtggtcaatacatcgattaacgcttttggtgcttcttgagaaccggaaacttcttgcaaggaaatagttagcggaaaaagataactagctaatactgcaattgttgcggctaataaggtagtaaataaatacaaagaaataattggcttaatgtaggtttgagtcgttgattgatgctttgatatagaggccatgattaatacaaatactaataatggcgctaccgcttttaaagccccaacaaatagactcccaaatattgcaatgaagctccattgaggaagaaatattcctaataagcctccaaggataatacctatcacaattcgcttgattaacgaaagctgcttgaaaaaatctaacaaaacaagaaaccccttttcattttttaattattttggcactatatggcaattaaagtttaattgaaataaagggaacctgcaaccgtttctttagaaccatttttagcaaataacaggcttgctagattggttggtaactctgagaatcatttgtacggttgagcatctcaagtcagcgattttttacagttgaacgaagatttacgtgacagtttcatctaattcgtctctcattcattcggcttaactctccctatttttagaaaaacatgtataataactaatgagtataggcacagaccgtactgattacggggtctgagtaagctaatatagataaagaaactagagaggtggatattttgagtacagtcaaaataattcccttcagcggagtacgtgaaaatggtaaaaacatgtacgcggttgaagtggataatgatatttttgtcctcgattgcggactgaagtatccagaaaatgaactattgggaatcgatgttgtgattcctgattttacctatttaattgaaaacgcggatcgcgtggcaggggtctttttgactcatggacatgcagatgcgatcggagcgttgccttatttcatatctgaagtggccgtgccggtcttcggaactgaattaacgattgagctggcaaaactgaatgtgaatcaaaatgaagaaagtaaaggattcaaggattttcacgtgattgatgagcataccgagattgattttgggactgcggttatcagcttcttccggacgacccatacgattcctgattctgtcgggattagcttgaaaacagctgaaggcagtatcgtatatactggtgacttcaagtttgacccaacatcgatcccaatgtatgcgacagattatcgtcgtttggctgaaattggttcggagggtgttttggcattgttgagttcttcatcgaatgcagaaaatccaatccaagtggcttctgaacgggaaatcgccagtgaagtctatgacaccatcaatgagtggaacggacgaattatcgtagcgtgtgttgccagcaacctgcagcgggttcaacaaattttaaatgcggcagaaaaggctggacgtaaggtagtcttgactggacaagatttggatcgcatcatcaaaacagcgatgcgtttgaataagcttgaggtaccagaagatattttagtcacaatcaaagaaatgaagaaatatcagccagaagaactgatcatcttagaaacaggccgtatgggcgaaccaatcaagtcgttgcaaaaaatggccaatcgctcacatcgcaacttgaaaattgaagacggcgatttagtctatatcacgacgacgccaacgatcgcaatggaaaccacggttgcgaagacggaggatatgatctatcgtgccggcggaatcgtaaaaagcatctctgagaacttacgggtttccggtcatgccaatcctcgcgatttgcaaatgatgatgaatttcatgtcaccgaaatatttcattccggtccaaggggagtatcgtcaattagctgctcatgcgagcttagcaaatgaaatgggcattcccttcaaggatattttcattactggccgcggagatgttttagagtataagaataagcatatgagtgctgccggcagtgtaccagcggacaatatcatgatcgacggaatcggtgttggagatattggcaatatcgtcctgcgggatcgtaaagttttatcggatgacgggatttttgtggtcgtagtgaccattgatcgtaaactgaaaaaaatcgtctctgccccgcagattacttcacgtggctttgtctatatcaaagcaagtcgtgatttgatcaaggaaagtgccgagattaccagcgagatcgttgaaaagcatctgcattccgatgattttgaatggagtaaattaaagcaggatattcgtgatcagttgagtcgtcatttgtttgaacaaacgaaacgtcgtccagtgatcttgccggttattatggaagccaatcaacgacgcggacgccgcaaatagttgaagccgtaaactctccaatcaataaacgattggagagtttttttaatacttactactctgtttttttgccaaaaaggagtatgattaaggtgtcagtaaatgtagagagggctggtcatatgttagaaaaaccattaaagtgtccaaattgcggcacacatttctttgttgatgaagtattgaatgttcaggagcatccgaaagaagcgatgccggttgaatgtccgaattgccaccatatttatgaaaaaaggatcaccaacggctatttcatgacttttgaagatcgggaacatggaaaatatgaggaagaagcgggagagtaatctctcgtttttatttttgcaatgcgtgtcacattcatggcagcatgagtgagctgtgtcatccatccagcaatttctattgatcgaatttataaaaaagggcgggaaattaaacagttcgagctacaaggaaagtcgatggttactttgatggtaacggttgacttcttttttttcgaacactctgttatactggttttgctaagctgtactaatataatagataaatgttatagcgggaggaaattatggcgacaaaacacgatctgattttagaacatattgagagtctgccggtgggagaacgaatctctgtccgcagcattgctaaaaatttgcgcgtcagcgagggaacagcctatcgtgcaattaaagatgctgaaaatatcggtttggtctcaacgatccaacgtgttgggacgatccgtattgaacggaaattgaaaaaaaatatcgaacgcttgacctttggcgaggtggttcgaatcattgagggagaagtcttaggcggctctaatggtttggacaaggatttgaataagtttgtcattggtgcgatgacagaagaagcgatgcgccggtacatcaccccaggctcgttattaatcatcggaaaccgtgaaggcgctcaaaagctggctttgcaggacggtgcagcagtcctaatcaccggcggctttgatacgacacctgagatcgccaagcttgcggatgaactagctttgcccgttttaagcacgacctatgattcttttactgtagcaacgatgatcaatcgggcgttgagtgatcaattgattaaaaaagatatcatgcaggtcagcgatatctacatgccgcttgaaaagaccgtctatttgcaagcaggggatacaatcgcgaactatcatcgattgtctgataaaaccggacattcacgttttccagttgtaaataaaagcatgcgggttttaggagttgtgacagccaaggacgttttaggaaaagctgaaaatctaatgattgatcgaatcatgacgcgagatccgaatgtggtgaagcagagtatgagtgtggcttcggtcagtcatcaaatgatttgggatggacttgaaatgatgccggtagtaaaagatgatctttctttagtaggaatggtcagccgtcaggatgtcatgaaggcgatgcagctcgttcagcgtcagccgcagatgtctaatacgatctctgatcaaatcgtcggtgatatcattacagttgatacagaccgagaagagaatcagttagagaatccctacttcaaatttgaggtcacccctcaaatggtgaacagtgtcgggacgatttcttttggcgtattgagtgagattgtagcgaatgtcgcccaacgaagtattttgctagatcagcggcgcaataccttaatcgagcagatgaatctgcattatttacgactgattcaattagaaagcgaaattgagattcattcaaaaacattagaactaggccgacgttcagcgaaggtcgatttggaggttttcattgacaatgtgattgtggctaaagcaatcgtagtctgtcaagtgatggaacgttcttagaaagaggaagagcatgacaattacagaagaaattttacaaatgattaaacaatacgatcggattatcatccatcgtcatatgcgacctgatccagatgcccttggctcccagtgcggacttgcggaaattttacgtgggtcttttccagaaaaggatgtgtatcaggtgggcggtccagttgaagggttggcctttttagctgaaatggatgagatatctgatgatctatacaacggtgctttggtaatcgtaacagacacggcaaatgcgccgcggatcagtgatgaccgctacaggtttggtgataagctgatcaagatcgaccatcatccgaatgatgacccttatggagacttgctgtgggtcaatacacaagccagcagctgtagtgagatgattgccgattttgcgtttgctgagaatttaacggtgaccgagaatgcagctcgtctattatatggcggaattgttggggatacaggacgctttttgtatccagcgactacctctcatacgttgcaggtagcggcgaaattattggatttcggctttgatgcaacgagattgaatcgtgaaattgatcaaatctcattagatgtggcgaagctgtcaggctatctttatcaaaatctgcaaattgatgaaaatggtgccggttatgtctttttggatcaagcgattctaaataagtatggtattaaggattctgacacggcggcgcttgtgccgctgccaggaacaatcgatgctgtgttggcatgggcaatctttgtggagcagccagaaggctattatcgagttcggcttcgctccaaaggcccggttatcaacgaattagctaaacgttatcatggcgggggccatcccttagccagcggagcaaacgcgaaggatcaggcgatgtgccaggacatctatcgtgagatccaagtattgtgcaaaaattacaaccaagatcgattgatttaaaaaaatctagaaatagctgtgaacaaaggttgtttcatgattgatacattaatactaggcatggaaagaaacgtaaggtgtttccttgggcttctttccatgcctttttgacttgaggaaagtataaaaatttttatatgaaaaatactttacggcaggtgtatccacgtccggcttcacgaacgagcttttctgcgttagctgcgcataaagttgctgctaaccttcattccggcaatcatctcactaagactgctggggattggtgctcaaaagctgagcgtgtgcgtgaagtctttcttattaagccacagacgtacatccagcgtgaaggtagttgaaagaaaacaatccaaatcattgtcaggttttgaggtatgaagcggtaaagcaagactaattaacgaatatataaaaagtgagtttatataaagtttttaaaattactatatttctttattaataactaaaattcaatttaggaaagtttttaatatataaaatgtcattcttcaaattctttagaatttttaaaaaaagatatttcggctttctatttacaatactcttttcattgttatattattatgagtgttaaaaaatgaaagcgctataaatacggaggggtagacaatgaatgtggcaaaactagctgagagacagttatttctaatgaaagctgagaatttggagaaacgagtacgcgcctactatgctcaaacacaggatgtggattccttgattgagtacggagtcgcgatccttgtacggagctttttctgcataggaagcttttcggagctgatccaagccttgattcaagaggtttattttacagttgaaccaactgctgtcatgcgccaatatttgccctattttgaagactatttcaccgaaaacgaatggcaaacagtagtaaatcgcctatttggcaatcatacaacctaccttgcgcaaacggaagaggcgcgtgtaaataaaggctatttagaacaaactgggacactcgataatcggattgagggtcttgtttatcgtgtagaagccgtttttgaagatactattgggaaaaaacacaagttgacgattcgtgataccgactccacttttagtgaatcgcaaacgattcaagtgttgaatatattgacgaccttgagtatttttgacacagctgatgtgcggaaatacgaaacctatgtgagttatcaaacaccgggaaaaatcattgcgacatctcataattcccgtcaaaaaaccaaaccaacagcgaaggaaccggaaaacatcgctgctgaacaacccccagaaaaagaaaaaacggtagccgcgactaataaaaagcagtcatctgcatcagtatctactttgcctaaagaagcgacgaagcagactgcttcaagtaacaacacttctctaaggaaaaatactaccctgaagaaaaaccaatcaagccctacgagtctgccgaaaaataccaacacgtccgacagtccgtcgccgaatcctgaactgaagaaaaaagcatctgggaataaagccaatgagctgttggaccaaccagatacgtcttataaacgtttaggcaaaagtgaagaacagattcagagcaatcgagacggtagaaagctgaagaatagagtgaataatgcgctggggcggagtaagaaccggaaaaggaacaaaaggaaatagcatgctgttttggcggtgctactctgtttgttggtagcgaaagtttacgaatcagcgagctttctgggttgatgcattctaataacgtggattttttaggaaagacttttcaagttccagattttccgctaaactaaatgtttagagaaaataaatttattggaggaaaagtatgccaaattgtcctatgtgtcagtcagagtacacttatgaagatcgcggcttatttgtttgcccagaatgtggtcacgaatggtctgaaagcgaagatgtggaagagggattagtcgttaaagatagcaatggcaatccattgcaagacggtgacagtgtgaccgttattaaggatttgaaagtcaaaggtgcttctggggccatcaaacagggaacgaaggttaaaaatattcgtttagttgaaggcgatcacaacattgattgtaaagtcgatggctttggccccatgaagctgaagtctgaatttgttaagaagttataagctagagagattcttagagccgttttcataaaaaattcatggctttcatgctaaactaagcttaggaaactgtttatttcaaacagcacaattatctttgattagaggagaatgtttatgtatgggtatggaacattttataattttctagatcccacgtttctattagttatcgccggactggtcatctctggacttgcttctgcttatgtcaattcgacgttccgcaaatacgatgagtttcgcagcagcaagggtgttacagggactcaagcagctgaatacattttgcgcagtcaaggaattacagatgtcggagtccagcaaattgccggaaatctgaccgataattataatagcgggaataaactgttgagcttatctgaagcaacggcacaatcgacgtcggtggccgctattggtgtggcggcgcatgagtgcggacatgccgtgcaggatgccaaaaattattttccgttgaaattacgggcagcgattgtacctgtagccaatatcggttcgacgctttcttttccattgattatgttaggtgtcattatgagctggaaccaaacattgattaatgtcgggattttggcgttttcattagcgctagtttttcagcttgtaaccttgcccgtcgaatttgatgcatcaagacgtgcattgagtattttgcgtgaaggaaatatgctggcagaagatgaactggcagccgctcgaaaagttttaatggcagctgcgctgacttatgtcgcagcagcattagcaacatttctacaattattacgactggtattgctttttggcaatcggagccgcgattaagaaccgacgacttgtcggtttttatttttttgtgttcaagcctatgaagcgtgcgctttcaatcacaagtagttcttattactgatatttttaagagtgtggtatcattaaataaaggagctgataccatgaaaagatcgaccaaagtcaaaatcggagtaggcgtcattgtcgcagccagcactgctactgctgtagtcgcttctgggaagctaattgaaaaggctcgtcatgtttcgaatcgctgtaaagtaaagcgttttgtgaatgctaagtttgacggcagtgaaacactgctagcgatcgttgataaactttcagatgaagatttagataacatcatgagtattttagacaagatcaagagcggaaaaaagcgcgtatcggtctatggtgattccatcaaagatacgaccgaggatttgaaagaccgattgatggatttagtagacaaagtaatgtaagaagatgtgccagtgatggcgcatctttttttgctgaaaaacttatgctaaagtaagttgatcagcaatcaagagaagttaagtgaggaaagaaatggaacgtgaaagtcagttgacggaagaagagaaaatatattttatggaagaagcgatcaaggaagccaagaaggctgaagaaatcgcggaggtcccgattggtgcgatcgttgtccataaaggagaaattattggtcgcggccataatttacgagagcacagtcaggatgcgacaagtcatgcagaaatgtttgctattcgcgaggcctgtcgtcatttgggcagctggcgattggaagagtgtcagctatttgttacgctggagccttgtccaatgtgcagcggcgggatgattttgtcgcgggtggaagaagtttattttggagcgtacgatcctaaaggtggtacagcgggaacgttgatgaatttattaacagatgagcgtttcaaccatcgcgcgtacgttgagggcggtattttggaggcggaatgtggaacgctattgaccaattttttccgcgccattcgagcacggaaaaaaaagactagccaaaacgagtagagtttgttatactattttttgccgaaaggcaggacaatgccgggcctgtgaattgtgtcaggtctggaaggaagcagcactaagtaggatccggcatgtgtctgatatagatgacattacagcagactttttggtctgctttttcttttaaccaaatcaacagggactgtctggatggcagttctttttttatagactttttatagaaagtcagaattaattgaagctctttcaaaataagcgtaaactgaagatattaaattttgggggtgcgacgatgaaagagaagcaggcatttcatatcaatgggtatttaggtttagtaggtttaattgtaattattggaattggtagctggggagtttttgctggcagtacaaaggaaagtttcggcttgatctttttaggcgttcttctatggattattgctggcttatttttaagttctttaacaatcgttgggccgaataaagcgaaggcagtcttgttttttggaaagtatcttggaaccatcaaagcaaacggcttattcattacaacgccgttgacgcgaaaaatcccggtgtctttgaaggtaagaaatttcaatagctcattattaaaggtcaatgattctgatggaaatcccgtcgaaatttcagcagtcgtggtttttcgagtggtggatacggccaaagcgttatttgatgtcgattactatttagattttgttgagattcaaagtgaaacagcgattcgtcatatcgcgacgcaatatccttatgacacattcaatgacgatgatttaacgttgcgaggaaatacgacggaggtatcagaagaattagctgaggaattacaagaacgtttagcgatggctggtgttgaggtaatcgagacgcgtttgaatcatttagcgtatgccactgaaattgccaatgcgatgctgcagcgacaacaagctaaagccatattatctgcccgacaaacaattgttgaaggcgcggttacgatgacgcaaatggcactggaacaaatcgaaaacggtcaggacattcagtttacagatgatcggaaagttcagttaatcaataatctgctggtttccatcatcaccgataaaggaacccagccagtgattaatacaggggatctatcagaaaaataggaggccagagaatgaagaagttatacattaaacagaaggtttttagtattggtgaaaagttcaccgtggttgatgaggatcaacggctgcactattcggttaagggcagctttatgaagattcccaaaacctttagtgttgaaaatgaacaagggaaagaagtcagtcgaattactaagaagacaattagtcttttgccaaaattttttgtcgagattaatgggaaagaagcgattgagatttccaaacagttgagcttcttcaaagcgaaatactcgatttcagctgaagatgtgacggttgatggcaactggtgggatatggattttgacgtgtcacgaaaaggacgaaagattgcggagataaacaagcgctggatttcgtggggcgatacgtacgagattacgattttagatgaatcattagaagagttaatcatttcgctggttattgcgattgattgtgtgaaggaggatgaagcagcagcttcgtcggcatcaagctaaagaaagataccgttgttgattgcctatcttcaacaacggtatcttctttatttagaaaagagtgatttcctgcagagtcggattctcaatcacgagtaactgctctttgatttttagaccttcttcactcgaaccggaatacccgaccagtttgccatttttcccaatgacgcgatggcaaggaacgaggattggcaagggattgttgcgattggcttgtccaatcgcacgaacagctctgggactttgaattttctcagcaatcgtcaggtagctgcacgtttcgccataaggaatctctgtcaacgcctgccaaactttttgctgaaaggctgttccagatgtaaaagcatagggcacattaaattccttgcgagcacctgctaagaattccaagagctgtttctttgctgtttgtagaatttcttggttggctaaggggctttcatcaattggtgtataagaaaccccaattaaggcatcgggactagcatctagccaaatcgtaccgagaatagagtcaaacttcatactttcacctgctcgtaatatatattttgaagaaactttcattccttcaatcgcccttaggggctattcctaatatgtttaaataaaataacgattactacttggatactgtaggatattcctgaataataagtcttggaaaggacttacgggaagacgctatcaccttctgcagttttactgcgacagaaagtctgtgacccgaaccgttggtataacctccaacacactagctgagtccattgacctctaccaatcctagtagagattgggtggcttagaggtttaatgaatgaaactctattatgcgaggctgtcgttagacaacgtgattctgggatatcccacagtacccaagcaatttccgaataatcaatgaaaggaggtccttccacatgaaactatttgtcggtttagacgttagttctgaaaaattagatgcttgctttatgacagacgattcaacttgctctgttttaaaagaagcatcttatggaaatagtcaacttggcgcaagccagatcaaagaatacattctcgaattttctcaaaaatttgagatagagagcttagtgattggaatggaggccacatctttatatagctttcatccagctatgttttttaaagaagatcttgagttaaatcaattgaaccttatggtttcagttgaacaaccaaataaaattaaaaagtatcgtgatatttttgaagaaaacaaaaacgatcaaattgatgctttttatatcgctgactattttcgcatccaaaggcaagtcaactccatcattaaagaggaagaataccttgccctccaacacttaactagaacgcgttatcagctaattaaacagctggttcgtacaaagcaacactttatcgaaaacatttattataaatgcaacacgctttctaaagaactaaaagcagaaggtggatccgttttaagtgccacattagtaactctaatgacggaagattacacaatggaccaacttgccgaactgtcattagaagagtttgcgaacctaattcaaaaactagggaagtatcgttttaaaaatcccgaaggaattgcaaaggcaatttctaaagccatacgtagttcctaccggttaggaaaagtccatcaggactctgtagatattgttttgggtgttctagccaaagaaattcgtagtcttgaaaagttaattaaagacttagacaaagccattgacgatttagtcgttgtgctacctgaatatcaatgtttaaccagtattccaggaatcggtcctgtttatgctgcgggtatactcgctgaaattggccctatcaatcgcttttcagatgaaagcaaattggctaaatatgccggtttatattggcgacagaaccaatcaggtaactctgagtatgaaaatactcctatggccaaacgaggcaatcgttatctccgttattatctagttgaagccaccaactccgtaaggagatacgagcctgagtaccatgcgtattataagaaaaaatacgctgaaacacccaagcataaacacaaacgagccatcgtactaaccgcaagaaaatttacgcgtctggtggatacgctactacgtaaccatcaactctatatgccaccaaggagcgtgatagataaataacagtatgttattgacgctaatccttggaagtacccgaaaaaatttttaattttggtcgggtttagttcagtgcgcttcaaaaattaactacctttaaaaatcttttgaaaaattatcttgacttattaccactagacttttttagcgaacgagttcgttcagccttcttgagctatatgttactatagatggaacaagaagagttgaaaagaggtagaataatggaaaaaattattcttttacataccaatgatcttcattcccatttagagaattggccaaagcttcgccgttttttactgaaccgcaaacaggaggaaacagcgaataagcgaattattaccgttgatttaggggattttgttgatcgctggcatcctttgacagaagcgactaatggccaagccaatgttcaattaatgaatcaaattcattacgacgaggcgactattggaaataacgagggcgtgggaaactcaaaggcggaactgaatcagctgtatgatcaggcgaatttcgatattcttttagataatctcttcgataagcagaccttgcagccaccaaaatgggcacaacaatctaaaattattacgaccgaacagggaacgagggttggattgctggccttcactgcccccttcccactaacctacaatcccaatggctgggacattcgccaggttatggatattttgccagatcttgtatcggagcttcgtccgaaagttgatgtgctcgtattgatgagtcatttgggaattagcgttgatcggcaaatcgcacgagagctgccggcaattgatgtgattctaggttctcatacgcatcatttatttgaaacgggagaaaagattggcgatgtgcagctagcagcggcggggaaatacggttattatgtgggcgaagttcatgtgacacttgatgataaacaccgcatccagaaaacttcagctcgtacctttcctacagaaaagatgctggagctgcctgaggaccaagaagaaattgacggatacctgacagaaggacaccgattattagcagataaggaagtcgcgaacattccctttaccatgagtacaaatctgcaaacggcgcatccgatgatcgattatacattggccgccgtaaaggaagcagctaagacagaagcagccgtgttgaactcaggattatttttaacggatattcctgctgggatcgtgaatcaagatcagctgcacacagcattgccgcatcccatgcatctaatcaaagtaacactggatggtaataatttgattcggctggttttagaaatggaaaagaatcgccatttcttaatcaattttcctgtgatagggatgggctttcgcggcaaaatttttggtcatctggtttatgatggcatcgaatatgatggagtgaatcatcaggttcgttggttaggagaaccggttgatccggagctggactatacgctggcgactgtcgatcattatatgtttgttccattttttccgacaatcgaaattgcggggcgttatgaatttttattccctgattttattcgcagtgttttgggggactatctccacactcactatccaatcaaataaaaacaaggtataatagcaaacaggtggtgaaacgatggcaaaagaaaaaagagacaaaaaagaacagaaaaacaattcagaaaaaacagtcacagaagaattggctgaggtcttagatgaaatcgttgagacacccgctgaagaaaagaaaaaaggtgaaaccgtcgtatttgtcgatgatagtaatcttttgattggcgaacgccaataccgcttagttagaaattatcgtgaaggctttgatgccgaacgtttaggtgaacgctttagtgaggtcttgacacgctatgattacattgttggtgactggggctatgaccagttgcgcttaaagggctttttccgcgaagacgatcgaaaaagcttaccggagcagcggattgatacattagaagattatttgtatgagtactgcaattttggttgtgcttattttgtcttggaacggacaggcggaaaacgccagcaaacgcgaaaaaaacgcaaacgcaagcggaaggacaaatctcaagcatacgtggaggagaaaaaagttccagtaaccaataagccaaagaaaaaaccagtaatcaaaaaccgtcagccaaaaaaggaaacacctacaaagacaaaagaaaaagacgaacgctttgtaattcgtcaaagggaagagtaataggatgtacgaaggatacctgattgacctagatggaacgatctatcgcggaagcgagccgattcctgctggtcgccgctttgttgagcaattgcaggcgcgccagattccatttttatttttgaccaacaatacgacaaaaacaccagagacagtagccaatcgattggctaatgaattctcgatccatgtgggaccagagacagtctatactgcgacacttgccacgattgattatttgaatgatgcaaataaaggcaagaaggtctatgtaatcggtgaaccaggcttgattgaaccgattttagctgcgggatatgtctgggaggaagagacacctgattatgtagtggtgggattggacacggacgttacttatgagaagtttgtcgtggcaaccttggcgattcaaaagggtgcgacctttattggaacaaatcctgataaaaatatcccaactgaacgtggtctgctgccgggcgctggctcggtgattgccatgatcgaagcctccacgcaacaaaaggccatctatattggcaagccagaagcgatcattatggagaaagcagtagaaaccttaggtatggaaaaagcaaatgtgctgatggtgggagataattacacgaccgatatcttagcgggaatcaataatggaattgatactctcttggtattgtcaggctttactcaaaaggcagatgtaccgactttgccagtaccgccgacttatttagtggactcgttagatgagtggcgtttcaatgaagaataagtggctagaacgcattggattgatttgcctgctagtgactttgctgacactggcgattacgctgacgattaatgcccgctggctctatcagtttgatatcggacagttagacttgttggattatacatcactttctgaaaaagagctgctgcataactttgatcaattaatgcgctatttgaatttgccttggataaagacacttaaaatgacagactttccagtctcatctagcggcgcattgcatttttatgaagtcaaaaagctgttcttactgaattacggcttattattggtaacagtcgtgcccagcatactttatatacgtcagttaatgaaacaacagtgtctgtggaagctgatccagccattccgcattgcggttgttgtaccgatcgtgatcgcgtttttgatggcagtgaattttgatcgcttcttcgtgatgtttcatggggtctttttcaacaatgacgcatggatttttaatccggcaacggacccgatcattaatgtgctgccagagacatttttcctgcattgcttcattttattttttatcttgctagaaattttttatctattaccgatctattttggtaaaagggcattaaaaaaagagcgttaagctcttttttttgttgtccttatttaacgattgaatctaatttgcgaggatgctcgtgcgctagacgactggcagctgacgcggcgatcgcaccaacgagatcatccaaaaaagtatgaacatgcacaccatcgtgctcgttaagcttcttcaagattccaggcttcactttatcgatatagccataatttgtgaagccgatagaaccataaacgttgacgatcgacagagccatgatttcatcgattccataaagaccttcatcttcttcaaggatattttgcaatggataatccagctttttttgttcggctaacttatccagctcgatccccgtgataatggcgttgtgtacctctcgcttggtcaatacgcgattcacactatggatacataattcgatgtccaatttttcaatataatccttttgtaaaaagaacaccaagtctgcaatatctctaatagtgactccgcgctcctcaagaagttcacgtgctttttgctcaagagcagtcgtttcgaataccatattgtacctcctttttagtttgtgcagctgacattgcacgacacgacctccagctgaagctagatttgtggaaataggctggtgctgtgtccaggttgcgtgcggtttttgggatttatataatgcagggcattattgacagcagtcggagcttcccccattcctgtggcgatcaatttcaccttgccgtcataggtagaaatatctccgcaggcatagacgccaggaattgacgtgcgcatatccgattcaactaggatcgcttgccgtgtgctttctagtccccacgattttaaatgatccaaagaagaagaaaagccgtaattgacgatcaagtaatccacatttaaagtaattgtctcatcactttttgccttttgtaaagtcaaatcttccaaatcctgttcgccatgaagttctttaagaatataaggcgtgtagatattgacggacgatttctttagtttttcaacactatgctcatgtcctcggaaggtatctcgtcgatgaatgatcgaaacttcagcagcgattggctctagcattaatgcccaatcgatcgcagaatccccgccgccagcgatggccacttttttgccggcatatttcatcagatcgttgatgtaataatcgattccgtgattttcaaatgtatccgcatcagcgatcattaatcgtcttggctgaaaggagccgttaccgatagccagtactactgactttgtatagtgagtatccttcgtggtaattaattcaagatagtcctcatgctgcttcaattccaaaacttcttcttctaagcagtaagtatgggaaaaagtccgtaattgcttttccaaattgtttaccagatccgccgctttaacgatcgggaatccaggaatgtcgtaaatatttttttcagggtaaagtgtcgtcagctgtccgcctagctgtggcaaactatcgatcagctttgttttcgcttggcgtatcccagcgtaaaatgccgcaaacatgccgactggtcctgcacccacaatggttatatcaaaaatttccatatcaacaccctttctttccatcgattgtaacaaataaatgagagagaaagaaacgcttggcttgtaaaggtggcaaaacgcaaaaagtttgttatgatggacacagcaaaaaaataaaggaggacattgaagtgactcaatttccacaattaaacttaacagaagaaaaaggtcctaaagcgacgatcaaaactaatatgggtgatatcacggttcaactatttcctgaagaagcaccaaagacagttaagaactttatcgaattagcgaagaagggctattacgacggcgtaattttccaccgtgtcattcctgatttcatgatccaagggggcgacccaactggtactggtatgggtggcgaaagtatttacggtgagaaatttgaagatgagttttcacgtaatctatttaacctgcgtggcgcattatcaatggcaaatgctggtccgaactcaaatggcagtcaattctttatcgtgaacaatcaaaatgtgccggctaatatgatgacacaattagaagaagctggattcccgggagaaatcgttgaaacctataaacaaggcggaactccttggttagacttccgtcatacggtttttggtcatgttgttgaaggtatggacgtggttgatgagattggtgctgtaaaacgtggcgcgcaagataagcctgtgcatgatgttgtcatcgaatcaatcgaggttactgaataataagaatgattagaaaaaggttccctgctccgcaaattgagcagggaaccttttttaatttaacttaatgctcttacgattcggtttaagccttcttctaaaactactcgcggacaggcgacattcaaacgcatatgctgcttcccgcttggcccatagctaacccctgtatttaagacaaccttgcctttatggacgaagcgctcttctaattccttatcagaaagatcgtattccgaaaaatccaaccacaatagataggttccttcaggctccatgatttttacctttggcagctgttctcggaagaagttcattgtataagtaatattggattgaatataaggtagtagttcggctaaccattcttcacccgtttcataagccgcttccataccgactaaaccaaaggtattgatttcttgttgaaagttctcttcttgcttacggattaattggctgcgcagtttctcatttttgacaaaaacaacggaatttttgattcccgctagattaaaggtctttgtcatcgaagtaaattgtaagctaaagttgctaaagccttctccggcattaaaaaatgaagtcattttattcggcggaaacactaaatcctgatgaatctcatcgcttaagacaagcacttgatatttttggcaaagttcgcctaattgatagagttccttcttcgtccaaactcttccaccgggattgtgaggattgcataaaatcataacttttacctggtgttgtttgaatttttcctccatgtcagccaagtccattacaaaatgtccattctcctcgactaattggcttcgaaccaattgccgacgattcgtcgtaatgatgtttgcaaatggagggtaaacaggatcgtggattaaaattacgtcatttggctttgtgaaggcttgaatcgctgtagtaattcctgctaagacaccagagaaaaaaagaatctcttcttttcttacggcaagcttaaaatgttcctgctcccaattgctgatagcggtataaagtgtatcaggtgtatcagcgtaacctaagattccatgttctaacaatttttgataggcttgtaagacgccggcgggcgctttgaaatccatgtcggcaatccacaacggcaaaaggttctcttcattataggacttaaggatcgcatcccatttgacgctgttagagccaaggcgatcgatcggttgttcaaaatttgtcatttctcttcctcctgatggctaacttcaattttgtttataaatacagtataatgaaacatgcgaaaagagggaaatgaatgggatataaaattggagatattatcgaagggcaagtcacaggtattcagccatatggtgcgttcatctcattagatgctcagacacaaggattagtccacatatcagaggtacagtctggttacacaaaaaacatacacagctttttagaggttggacaagtggtgaaggtacaagttattgatattgatgaatatactaagaagatcagtttatctttgcgaacgttggcagagcattccgctgaagtgccttaccatcggaaacgttactttacaaatcgcaataaaaacataggcttccgctccttagagaaaaacatgcccgcttggacggatgaggcaatcgattttctattgaaagaacaagttgaaaattaaggcttattttatgcaaagaatatctttttttctgaaaacgtgatacaatgattccgatttacgattagcttttgcagaggtgaaaattgtgacaaaacaagtgtcaggaacaatcatgttgcatttagaagatggatcgaagcgttttttagttcacgaaataggaaaagagaaagaatttgctcgcactgataccaaagccgaaaacaccgttttagctagttttttgaatttcttgaaggcgacactacatattaatgttaataatattcggctagtcgaattaacgaatacacaatcacacggtgctagtttgccgttatatgtatttgaaatgactagtgaagaagctacagagctccccgaaggatttgcttgggagagtccagacagcgtcagaaaaatccttggaacaatcgaaattgaaggtgtaccattatttgaataaacctgaaaaagaagcttatgaataataagtttcttttttttgaagaaaatagttgaccatggaatgattaaatggtaaattaataaacgttgctgatacagcaaaagccgaacgatgaattttgaaattaaaaaaaattcaaaaaagttattgacatttgcttggtaacctgttaagatataaaagttgctgaaacaaagcaacaaacaatgtagacctttgaaaactgaacgaataaaacaaaccaaatgtgtagggcgcttctactatatagaagcaaacaacatagcaagcaatatgctagcaagtcaattattacaattgagcttaacagtcgcaaggctgtttcaaacactttttatgagagtttgatcctggctcaggacgaacgctggcggcgtgcctaatacatgcaagtcgaacgctttttctttcaccggagcttgctccaccgaaagaaaaggagtggcgaacgggtgagtaacacgtgggtaacctgcccatcagaaggggataacacttggaaacaggtgctaataccgtataacaatcgaaaccgcatggtttcggtttgaaaggcgcttttgcgtcactgatggatggacccgcggtgcattagctagttggtgaggtaacggctcaccaaggcaacgatgcatagccgacctgagagggtgatcggccacattgggactgagacacggcccaaactcctacgggaggcagcagtagggaatcttcggcaatggacgcaagtctgaccgagcaacgccgcgtgagtgaagaaggttttcggatcgtaaaactctgttgttagagaagaacaaggatgagagtagaatgttcatcccttgacggtatctaaccagaaagccacggctaactacgtgccagcagccgcggtaatacgtaggtggcaagcgttgtccggatttattgggcgtaaagcgagcgcaggcggtttcttaagtctgatgtgaaagcccccggctcaaccggggagggtcattggaaactgggaaacttgagtgcagaagaggagagtggaattccatgtgtagcggtgaaatgcgtagatatatggaggaacaccagtggcgaaggcggctctctggtctgtaactgacgctgaggctcgaaagcgtggggagcaaacaggattagataccctggtagtccacgccgtaaacgatgagtgctaagtgttggagggtttccgcccttcagtgctgcagctaacgcattaagcactccgcctggggagtacgaccgcaaggttgaaactcaaaggaattgacgggggcccgcacaagcggtggagcatgtggtttaattcgaagcaacgcgaagaaccttaccaggtcttgacatcctttgaccactctagagatagagcttccccttcgggggcaaagtgacaggtggtgcatggttgtcgtcagctcgtgtcgtgagatgttgggttaagtcccgcaacgagcgcaacccttattgttagttgccatcatttagttgggcactctagcgagactgccggtgacaaaccggaggaaggtggggatgacgtcaaatcatcatgccccttatgacctgggctacacacgtgctacaatgggaagtacaacgagtcgcgaagtcgcgaggctaagctaatctcttaaagcttctctcagttcggattgtaggctgcaactcgcctacatgaagccggaatcgctagtaatcgcggatcagcacgccgcggtgaatacgttcccgggccttgtacacaccgcccgtcacaccacgagagtttgtaacacccgaagtcggtgaggtaaccttttggagccagccgcctaaggtgggatagatgattggggtgaagtcgtaacaaggtagccgtatcggaaggtgcggctggatcacctcctttctaaggaaatagttcatcgaagatgaacgttacggaaactacacaggattgcttttattcgttcagttttgagaggtctactctcaaatcgttcattgaaaactggatacagaaacaattttaaacaaaccgagaacaccgcgttgaatgagttttttaataagttcaattgcttatttattactaaggaacatgatcgctcatgggaattagtaagacccttgacgaaagtcaagataaggttaagtgaataagggcgcacggtggatgccttggcactaggagccgatgaaggacgggactaacaccgatatgcttcggggagctgtaagtaagctttgatccggagatttccgaatggggaaacccagcatcttttataggatgttacttttcagtgaatacatagctgattagaggtagacgcagagaactgaaacatctaagtacctgcaggaagagaaagaaaaatcgattccctgagtagcggcgagcgaaacgggaaaagcccaaaccaagaggcttgcctcttggggttgtaggactccgatatggtagtccagtgagatagtcgaaggacctggaaaggtctgctagaaagggtaaaagccccgtagacaaaatttgactggcacctaggaggatcctgagtacggcggaacacgaggaattccgtcggaatccgggaggaccatctcccaaggctaaatactccctagtgaccgatagtgaaccagtaccgtgagggaaaggtgaaaagcaccccggaaggggagtgaaatagatcctgaaaccgtgtgcctacaacaagttagagcccgttaatgggtgatagcgtgccttttgtagaatgaaccggcgagttacgattacttgcgaggttaagttgaaaagacggagccgcagcgaaagcgagtctgaatagggcgaatgagtaagtggtcgtagacccgaaaccatgtgatctacccatgtccaggttgaaggtgcggtaaaacgcactggaggaccgaacccacgtacgttgaaaagtgcggggatgaggtgtgggtagcggagaaattccaaacgaacttggagatagctggttctctccgaaatagctttagggctagcctcagagtaagaatgatggaggtagagcactgtttggactaggggcccatctcgggttaccgaattcagataaactccgaatgccatccattcatctctgggagtcagactgtgagtgataagatccatagtcgaaagggaaacagcccagaccaccagctaaggtccccaaataactattaagtggaaaaggatgtggggttgcacagacaactaggatgttggcttagaagcagccaccatttaaagagtgcgtaatagctcactagtcgagtgaccctgcgccgaaaatgtaccggggctaaatagtttaccgaagctgtggaacacaccaatggtgtgttggtaggagagcgttctaagggcgttgaaggtagatcgtgaggactgctggagcgcttagaagtgagaatgccggtatgagtagcgaaagacaggtgagaatcctgtccaccgaatgactaaggtttcctggggaaggctcgtccgcccagggttagtcgggacctaagccgaggccgaaaggcgtaggcgatggataacaggttgatattcctgtacccgttgtttttgtttgagcaatggagggacgcaggaggctaaggaatcagacgattggaaatgtctgtccaagcaatgagtcttgatgtgagtcaaatgcttacatctctaaggacaagttgtgatggggagggaaataatagtaccgaagttcctgatgtcacactgccgagaaaagcttctagtgagaaaacaatggcccgtaccgcaaaccgacacaggtagtcgaggagagaatcctaaggtgagcgagagaactctcgttaaggaactcggcaaaatgaccccgtaacttcgggagaaggggtgctgatctaacgatcagccgcagtgaataggcccaagcgactgtttatcaaaaacacaggtctctgcaaaatcgaaagatgacgtataggggctgacgcctgcccggtgctggaaggttaagaggagtgcttagcgtaagcgaaggtacgaattgaagccccagtaaacggcggccgtaactataacggtcctaaggtagcgaaattccttgtcgggtaagttccgacccgcacgaaaggcgtaacgatttgggcactgtctcaacgagagactcggtgaaattttagtacctgtgaagatgcaggttacccgcgacaggacggaaagaccccatggagctttactgcagtttgatattgagtgtttgtaccacatgtacaggataggtaggagccgtagaagtcgggacgctagtttcgacagaggcgctggtgggatactacccttgtgttatgaccactctaacccgcaccactaatcgtggtgggagacagtgtcagatgggcagtttgactggggcggtcgcctcctaaagagtaacggaggcgcccaaaggttccctcagaatggttggaaatcattcgcagagtgtaaaggcacaagggagcttgactgcgagacctacaagtcgagcagggacgaaagtcgggcttagtgatccggtggttccgcatggaagggccatcgctcaacggataaaagctaccctggggataacaggcttatctcccccaagagtccacatcgacggggaggtttggcacctcgatgtcggctcgtcgcatcctggggctgtagtcggtcccaagggttgggctgttcgcccattaaagcggcacgcgagctgggttcagaacgtcgtgagacagttcggtccctatccgtcgcgggcgttggaaatttgagaggatctgtccttagtacgagaggaccgggatggacttaccgctggtgtaccagttgtctcgccagaggcatcgctgggtagctatgtagggaagggataaacgctgaaagcatctaagtgtgaagcccacctcaagatgagatttcccatttctttaagaaagtaagatccctgagagaagatcaggtagataggtcaggagtggaagtgcagtgatgtacggagcggactgatactaatcgatcgaggacttaaccaaaaattgattcacggttgttagaatgtttctgatccagttttgagtgaacgacgtttactcaattaaatactagtgtggtggcgatagcgagaaggatacacctgttcccatgtcgaacacagaagttaagcttcttagcgccgattgtagtgaggggttgccccttgtgagattaggacgtcgccgcgcgaattccatcctgataaaggatggaatttttatttcaatagtaacagttcttgaatatagaggaaattctttgcttttaagtgactgttgttagttatagtaactaaaaggtgatcgcttttatgagttttaaatgataattaaaatttattgaataaagctattgacacttttaagatattaagttattataactgagttgctgaaatattgaatataactttttcgaaaaaacttcaaaaaagttattgacatttggttggcaacctgttaagatataaaagttgctgaaacaaagcaacgaacaatgtagacctttgaaaactgaacgaataaaacaaaccaaatgtgtagggcgcttctattaatagaagcaaacaacatagcaagcaatatgctagcaagtcaattattacaattgagcttaacagtcgcaaggctgtttcaaacactttttatgagagtttgatcctggctcaggacgaacgctggcggcgtgcctaatacatgcaagtcgaacgctttttctttcaccggagcttgctccaccgaaagaaaaggagtggcgaacgggtgagtaacacgtgggtaacctgcccatcagaaggggataacacttggaaacaggtgctaataccgtataacaatcgaaaccgcatggtttcggtttgaaaggcgcttttgcgtcactgatggatggacccgcggtgcattagctagttggtgaggtaacggctcaccaaggcaacgatgcatagccgacctgagagggtgatcggccacattgggactgagacacggcccaaactcctacgggaggcagcagtagggaatcttcggcaatggacgcaagtctgaccgagcaacgccgcgtgagtgaagaaggttttcggatcgtaaaactctgttgttagagaagaacaaggatgagagtagaatgttcatcccttgacggtatctaaccagaaagccacggctaactacgtgccagcagccgcggtaatacgtaggtggcaagcgttgtccggatttattgggcgtaaagcgagcgcaggcggtttcttaagtctgatgtgaaagcccccggctcaaccggggagggtcattggaaactgggaaacttgagtgcagaagaggagagtggaattccatgtgtagcggtgaaatgcgtagatatatggaggaacaccagtggcgaaggcggctctctggtctgtaactgacgctgaggctcgaaagcgtggggagcaaacaggattagataccctggtagtccacgccgtaaacgatgagtgctaagtgttggagggtttccgcccttcagtgctgcagctaacgcattaagcactccgcctggggagtacgaccgcaaggttgaaactcaaaggaattgacgggggcccgcacaagcggtggagcatgtggtttaattcgaagcaacgcgaagaaccttaccaggtcttgacatcctttgaccactctagagatagagcttccccttcgggggcaaagtgacaggtggtgcatggttgtcgtcagctcgtgtcgtgagatgttgggttaagtcccgcaacgagcgcaacccttattgttagttgccatcatttagttgggcactctagcgagactgccggtgacaaaccggaggaaggtggggatgacgtcaaatcatcatgccccttatgacctgggctacacacgtgctacaatgggaagtacaacgagtcgcgaagtcgcgaggctaagctaatctcttaaagcttctctcagttcggattgtaggctgcaactcgcctacatgaagccggaatcgctagtaatcgcggatcagcacgccgcggtgaatacgttcccgggccttgtacacaccgcccgtcacaccacgagagtttgtaacacccgaagtcggtgaggtaaccttttggagccagccgcctaaggtgggatagatgattggggtgaagtcgtaacaaggtagccgtatcggaaggtgcggctggatcacctcctttctaaggaaatagttcatcgaagatgaacgttacggaaactacacaggattgcttttattcgttcagttttgagaggtctactctcaaatcgttcattgaaaactggatacagaaacaattttaaacaaaccgagaacaccgcgttgaatgagttttttaataagttcaattgcttatttattactaaggaacatgatcgctcatgggaattagtaagacccttgacgaaagtcaagataaggttaagtgaataagggcgcacggtggatgccttggcactaggagccgatgaaggacgggactaacaccgatatgcttcggggagctgtaagtaagctttgatccggagatttccgaatggggaaacccagcatcttttataggatgttacttttcagtgaatacatagctgattagaggtagacgcagagaactgaaacatctaagtacctgcaggaagagaaagaaaaatcgattccctgagtagcggcgagcgaaacgggaaaagcccaaaccaagaggcttgcctcttggggttgtaggactccgatatggtagtccagtgagatagtcgaaggacctggaaaggtctgctagaaagggtaaaagccccgtagacaaaatttgactggcacctaggaggatcctgagtacggcggaacacgaggaattccgtcggaatccgggaggaccatctcccaaggctaaatactccctagtgaccgatagtgaaccagtaccgtgagggaaaggtgaaaagcaccccggaaggggagtgaaatagatcctgaaaccgtgtgcctacaacaagttagagcccgttaatgggtgatagcgtgccttttgtagaatgaaccggcgagttacgattacttgcgaggttaagttgaaaagacggagccgcagcgaaagcgagtctgaatagggcgaatgagtaagtggtcgtagacccgaaaccatgtgatctacccatgtccaggttgaaggtgcggtaaaacgcactggaggaccgaacccacgtacgttgaaaagtgcggggatgaggtgtgggtagcggagaaattccaaacgaacttggagatagctggttctctccgaaatagctttagggctagcctcagagtaagaatgatggaggtagagcactgtttggactaggggcccatctcgggttaccgaattcagataaactccgaatgccatccattcatctctgggagtcagactgtgagtgataagatccatagtcgaaagggaaacagcccagaccaccagctaaggtccccaaataactattaagtggaaaaggatgtggggttgcacagacaactaggatgttggcttagaagcagccaccatttaaagagtgcgtaatagctcactagtcgagtgaccctgcgccgaaaatgtaccggggctaaatagtttaccgaagctgtggaacacaccaatggtgtgttggtaggagagcgttctaagggcgttgaaggtagatcgtgaggactgctggagcgcttagaagtgagaatgccggtatgagtagcgaaagacaggtgagaatcctgtccaccgaatgactaaggtttcctggggaaggctcgtccgcccagggttagtcgggacctaagccgaggccgaaaggcgtaggcgatggataacaggttgatattcctgtacccgttgtttttgtttgagcaatggagggacgcaggaggctaaggaatcagacgattggaaatgtctgtccaagcaatgagtcttgatgtgagtcaaatgcttacatctctaaggacaagttgtgatggggagggaaataatagtaccgaagttcctgatgtcacactgccgagaaaagcttctagtgagaaaacaatggcccgtaccgcaaaccgacacaggtagtcgaggagagaatcctaaggtgagcgagagaactctcgttaaggaactcggcaaaatgaccccgtaacttcgggagaaggggtgctgatctaacgatcagccgcagtgaataggcccaagcgactgtttatcaaaaacacaggtctctgcaaaatcgaaagatgacgtataggggctgacgcctgcccggtgctggaaggttaagaggagtgcttagcgtaagcgaaggtacgaattgaagccccagtaaacggcggccgtaactataacggtcctaaggtagcgaaattccttgtcgggtaagttccgacccgcacgaaaggcgtaacgatttgggcactgtctcaacgagagactcggtgaaattttagtacctgtgaagatgcaggttacccgcgacaggacggaaagaccccatggagctttactgcagtttgatattgagtgtttgtaccacatgtacaggataggtaggagccgtagaagtcgggacgctagtttcgacagaggcgctggtgggatactacccttgtgttatgaccactctaacccgcaccactaatcgtggtgggagacagtgtcagatgggcagtttgactggggcggtcgcctcctaaagagtaacggaggcgcccaaaggttccctcagaatggttggaaatcattcgcagagtgtaaaggcacaagggagcttgactgcgagacctacaagtcgagcagggacgaaagtcgggcttagtgatccggtggttccgcatggaagggccatcgctcaacggataaaagctaccctggggataacaggcttatctcccccaagagtccacatcgacggggaggtttggcacctcgatgtcggctcgtcgcatcctggggctgtagtcggtcccaagggttgggctgttcgcccattaaagcggcacgcgagctgggttcagaacgtcgtgagacagttcggtccctatccgtcgcgggcgttggaaatttgagaggatctgtccttagtacgagaggaccgggatggacttaccgctggtgtaccagttgtctcgccagaggcatcgctgggtagctatgtagggaagggataaacgctgaaagcatctaagtgtgaagcccacctcaagatgagatttcccatttctttaagaaagtaagatccctgagagaagatcaggtagataggtcaggagtggaagtgcagtgatgtacggagcggactgatactaatcgatcgaggacttaaccaaaaattgattcacggatgtttgaatgtttctgatccagttttgagtgaacgatgtttactcaatagaatactagtgtggtggcgatagcaagaaggatacacctgttcccatgtcgaacacagaagttaagcttcttagcgccgattgtagtgaggggttgccccttgtgagattaggacgtcgccacgcatattattccggcatagctcagttggtagtagcgcatgactgttaatcatgatgtcgtaggttcgagtcctactgccggagttctagacaatctcttgtagattgtctttttttttgtgcacttggcatgggacgacaatttaggtggtgaaagtccgatgtggggaaacaacacatcgtccagcaactataaaagtgcaaatgcaagaggtatttcttctctaaaagtacacactgttaatataaattgaattaccctatgcagactcgtatatatggtgttgtgagaagtggagctgtgacaaagtcttgtcatagcttttttccgaataaacggtgttccagaagtagttttttcggaaattccttcttatttcttgaagttgaccacttctgttacaacctcatctattcgattgtgagcaaagtatttagatgattggtaaaatcgtgctatgctctaactgaggtgatgagaattatgtatataaatatagcggatgatttggtagaacgtcttaaaaagtatcaagatagtcgaattgttttagatttggatgacggtgtgggtcagtattctaaatctggaagttgtgcattgaatattagttttcgattattgattttggataaggaacaggatcattcagattataacttagacattgaaagtaatattggcagtattgcgatcaaagaacattccaagttatacttagaagatgagatgacattaactttcgatccaaggatgtccttaatcaaattgaagggtcctagtggtatgattgatggaaatgtacaaatgattgatttacgtgaaaataaggagtgagctcattgagctcactccttatttagttggtctttcgaggtctaatgtacccgcgatatggctgtatgtagcgccagctagacgagcaagtggatcaaaagtcaatggatcaatgtattcgttctctggatcaaacaagttttcttcaaagtgatagtttaagacctctaggataaacaggtcgctaataatagtatcattatgatccttaacagggatatgttggtgtaaacgaacttcaaatcgaatcggagcatctaagatcgccggtactgtgacttcttgactatccactaaagtgagagacgtttttgccaactcactttcgtcagcaggtaatgaagcagaggtttgattcatttctgctaaaactttgtcgtttaccagatgaatgactccttctttttgttgaagcagattacgcgcggtgtctttgatcttttgattattacggttaatcgaaaggctgactaacggcagatctttagcgacaacattgaagtagctaaaaggagcagcgttcacgatgtttgtttcttgattgattgtcgtgatccatgcgattggacggggaatgatactccctgttaaaaatttgtaatgttgtttggtcgtcagttctttagctgaatagaagagcatagtattctccttattgacgttttttattggcatcagatgtgtcgaatggccgaacgtactcttcgatttcttttcgttttgactgtaaatgaggcggtaaggaaagaatctcccctgcgtgctcataggtttcatcctgcaagaagcctggcccatccgttgctaactcaaacaaaacatgcggtgctgctaagaaatattctgattggaaatagaaacgatcgacaaaaccagaatttgggaattctaaggcgttgattttctcgatccaatcccgcaaagcgtcatcatcagcaacgcgtaaagctaaatggtgtacattgccgtagccttcttgtgctggaatcatgtctggctggtcatcgacaatgatggttgctccattgccgccttcgcctacctcaaattgatgcatgctaccttcagcagctgtttccttaaagcctaaaagattttctaaaactaattttaaatggtcaaattttgccacagttacaatcgtaggtcctaatccgaaaattgcgtgttcagcaggaacgtttgaatttttccatggtgttccgccagcaacaccttgattcttttcatcggacactaattggaataattgatcatcgtaatcatgaaattcaaggtattttttgccaaaacgctccttaatctctccatgagcgacagctaaatctgtaaagcgttgtgcccaatactccaatgaagcatcggttggaacacgaaagcccgtacgtgaaatgctgttggttccttttgttcctttgggaatccgtgggaagtcaaagaatgtcatatctgttccaggagcaccagtgtcatcggtaaagtataaatgataggtttcaatatcgtcttgattgacggtttttttaatcatacgtaagcctaaaatatccgtgaagaagcgataatttttttcggcactggaagttatagctgtaacgtggtgtaatccgcgaatttgtgtatccataataaattcctcctaattccttactaaaagtaagtataagtgttgtccatttttttagcaagaatattgccttaggttgatatttgtcagaggaatcagtaggatggaagcaggaggtagaggatgaaaaagattgtattgtttgatttagatggaacattgacggattcaagtgaaggaatcataaatagtgtgtgttatatgttgaaaaaaaagggcttagctattcctgatgaggcgacgttacatagttttatcggaccgcctttaacggatacattaaaacagctatatgatttgaaggaagcagaagcagataaagcggtgcagatttatcgcgaatactatgcagaacagggaatcaagcaattatctgtctatgatggtatcgaagaggtacttgcttcactagctccggattactatttagctatagcgacatcaaagccggagttttatgccgagcagattattgcaaatactggcttatctaagtatttttcaggaattttcggcgcggatctagccggtatacggtcaaataaaacggatgtgattgcctatgcgttagctcaattggaagaaactcccgctgtaatgatcggtgaccgaaaatttgatatcattggtgccaaagccaatcagatcaagagcattggcgtgctctatggttttggagagcgcaatgaaatgattgaagcacaagcagatcgaattgttgcaaccgttgatgaattatctgtcgccataagacagagcttctaaaaataaaaaaaaccctcatttgagggtttttaaaggctcttctatcgacttagtaccagccgtttgcttgccagaatgcttgagcgccttcccatgaaccatagcgagaagtcacgtattggtcggctacacgttcttggtttgctgcagagtagtcaccatttaagtatgaagctgataattggtaacgtccaatgtattggccgtttgtcgcagtgtatgaaccgctagattcacgttgtgcaatccattctttcgctgcatttgtgctagctggtgttgaagcttcagcagcaggagcagcggcttgttgtacaggagcagctgtttgtgtagtttcttgaacgggagcttgcgctgtttgagcaggagctgcttgttcttgaactggtgttactgttgtattgcctttagcgtctgtatcgatcgttaagttttgaccttcaaaaatcatgtcaatattagaaattttgttttctttagcaattgaatcaaccaagctgttatcgccagcaaatttgattgagatttttgataaggtatcaccagcttgaactgtgtagttttctgctgcatgtgcttcgtttgtccctagtgcaaatactgcgccagctgttagtaaagtcgtaagtacaagagtttttccaaatttcattatgtaaattcctccaaaaaagtttttaaatgtaaatcagtcatttcgattacgagtgatactttaccatcgtttcagattgcgtgggttataaaccagtgacaatacgttacagtgtaatgtattaatgtgacaataaataaccgaacgtgtgtttttgaaatacttaatctcttttaagaataattaaaaacagtgtactgataaggtttttggcaggtttttttcatgtcttattttgaaagcgctgcttaaagttgcaatgttgaaattttgttgtaaaaaatcagaaaattctatacgaaaaaatcatggaaatcgtcagaaattttcttaagaaaaggtaaaccaagctagattgaggtggaaaatgaaaatcacaatgaaagaggtggctcgcttagcaggggtttcagtgacgacagtgtctcagattctcaatcaaaagggcggccgctttagcgaagcgacgagacaaagggtattaaaggtgattgcagagcaagactattccccaaattattttgcttccaatattatcgcgaaaaaatcgaagacgatcggcgtgattgttccggatttttcggaacagtttgcttcggcgattgtccgaaaaatcagagagcaattggaaaagcagggctattatctgattatctgtgaatcagataatgatttttttaaggaacaggaattattgaatcaactagcaagaattgcagtcgaaggaatttttctgttcacgccaaatgattaccagggaaagaaaatcatcgaacgtggacgttttcaagagattccggtcgtttttgctgatcgcggtttgaatgaagggttttatgggaccatcaagctggatgaatattctggtgtttatcgtgcaatcgaatggctgatcacagaaggtcatgaaaaaattgcttttattatggataatgctgagcactatcatctgacagaacgttttgatgcttattgccaggcgttgaaggatcatgatctattaatagaagaaaaatacattaagcagatgcctttgacgatagctggagggtatcaaggaacgattgatttgttaaaagagacggacgttcgtgcgattttttgctgtgacgatatgctggcgatcggctgttaccaagcgctatatgatagcgggaagaagatgaatcaggacatcacgattattagctttgatggcggtgaagtcacacaaatccttcgtcctcaaataaaaagcgttcgtcagccatacgaagaattaggcaaggcctacgccgaaaaaatccaaatggcgattgaccagcccgatcgaaggatggacgatcggctttttcaggtcactttcgaaacaacataataagttcgaagtaggaagaaaaacttatatcccgcatggttttcgggatgtgaaattattttaaaattatttcatagcaaaaattatattgaaaatgttcgctaaaaatatttttaacttagtatatatgctgcttcataaaaaagtcataatttatcggccaaaagccattatttttctgataaaatatgatggtaataaagttatagtatttcttagccagcaggggtagttggcgtgaatgcatcaattttaagcgagaaaagtgagggtatattttgagaggtattagggaggatttttttcaagagaaaacgaaaaaaatcattattatcagtttggtggttttacttgtagttgttagtttttattcatttaagagtgttcattatgcggatcggttgttaccgaaaacgaaggtaaacagtatcaatgttggcggattaacgcttgagcaggcgaataaaaaaataaatgctgaattaacagaggcgccctttgaaattcacctgggcagtaccatatggaagcaatttaaacgaagtgaattgggctggcaaacagatcatctggaggagcttagcaaaatcaagcaaaatcaaaaaccatttgcttggggaattaccagcttgtttggcagccaatacgatttgccgaatatatacgatcaatccaaagtagatcaattgatagatagtttgggtacagtgctccttcaaacaaacgctgcgcgtgtgccgacaaaaaatgctacgattgaatggcaagaggatcattttgtgattgtcccagaaaagcaaggagatacctttgatgtcgaagcggtcaaaactgctttaaagaagtatctggaaaatggtgaggattcactagatacggaggattattacgcccagccagttctgactaaagaagatagtacattaaaaaaattaaagactaaaatgaatcaattagccaagctaaaggcagtctatacgattggcggaaagcagctaacgattcctccccaagaacttagcagctggttaactaccaatgaaaaagcggaagtgcttttgaaacaggatcaggtgacggcttttgtgacgaagttgaatgaagaaaacaatacgaaagaaaatccgacatcctttaacagtactttacgaggaaccgtttctgttcctgcaggtctttataactggacgatcgatattccttcagaggtgaaggaattaagtgctcagattctaaaaggtgagaactttaatcgtgtaccaaaagtagtaagtgatgtagaaaatattcagacaagcattggcaatacttatgtagaggtggatctgcaaaatcagcacatgtggtattacaaagaaggaaagctgcaatttgaaacggatatcgtcagtggaaaaccgtcaacgccgactcctcctggattaaactatgttcgaagcaagtcaatggatcaggtgctgagaggtttgaatgacgacggctctaaatatgctagtcctgtccggtattggatgccaatcgacgatacaggtgttggtatccatgattccgattggcagtacgcctatggcggagatttgtggctgtatcgcggctctcatggctgtatcaatacgcctccggccaaaatggctgagctgtatcctatgcttgatgagggaacaccagtcttagttttttaagaaaaaatcagatataagtgaacgtgctaacctgcgggttggcacgttttttatgctctaattgcgtcaactggtattagattttcataccaattattgaaaagtttatttgaatatagtatgaaagaaaaattctactagcatattttatcttacgaaaacttgataaaacagcattttaagccaacagtaaaattactaaaagatttattgttgacaaaggtaaaaaaaccaccttaccattgggttgtggttataaccagtttaaaagaaggagaagcccatggaaaattcttttaaaaacaaagctttgtatcatcaacttgtagatttattgaagaagcggatggaaagcggcatgattcctcatgataagctgccatctgagcgggaattaacagctcagtacggagttagtcggacgacggttcgtttagctttgcaagagctggaaaacacggggtacatttatcggcgtcatggaaaagggacatttgtctctgatatcaaaacagctgctgcagatttagctggtgcctacagctttaccgaacaaatgaaaagcctcggcagacatcctgagacgcgaattttatcctttgaaaaaatggaagccgataaatttatcgcacaacgactcaatcttcctttaggagaagcagttttcaaattgagtcggctgcggatcgcggatcgagagcctttaatgattgaagatagctatctgcctgtcaaattcttcttgtcattagatgatcagctattaagaagcaagcccttgtacgatcttttttcagaagattttaagcaaacggtccgtttagcagatgaagagctttatgccagcatcgcttcaaaggatgacgcgaaacagctgatgatccctgaaggagcaccagtcctgcatttagtccgtcagacctacaatatgaaaaatgaaatcattgaatttactttgagcgttgctcgcgcggatcaatttcattatcagattcgtcatattcgaaatagttaggagaattaaagcatgtttacaatagaaaaagaaaaattggaacaaatgggagcggagatcacgacgcgtgagattcgccaacagccggaactttggaaagaaacgattgacctttatcagtcagcccaaggggaattagaaaattttcttacagaagtccaaaaacaagcaaagggtcagcgtacacgcgtaattttcaccggtgcgggaacctcccaatatgtaggcgacacgctggttccttatttgcgcaaacacggcgatcgtcaagccttcagctttgaaagtatcggaaccactgacatcgtggcggagcctgaagaatatttaatcaaagaggaaccgaccttactggtatcctttgccagaagcggaaacagtcctgaaagcttggcagcagttgaaatcgcaaatcaagtcgtggatacgatccatcatttatcaatcacctgtgcaaaagagggaaaattggcgcaaatcagccaagccgattccaagagctttttattcttaatgcctgttcgttcgaatgatgacggttttgccatgactggcagcttctcctgtatgacactaggcgcgttgctgacatttgatcaaacagcactagaggaaaagcaaaactatgtagaaacattgaacgctttaggaaacgaagtgatcgcccgtgagcatgacatcgaagaaattgtcgcacttgattttgaacgaattgtttatgtcggttccggcagtttagcaggcttgaccagagaagcacaattaaaaatcctagaactgactgctggaaaaatcgcgacagtctttgattcatcgatgggcttccgtcatggtccgaaatcatttatcaatgaaaagaccctcatgttcggttttgtcaataatgatccatacacgcgggattacgatttagatatcttagaagaagttcacgaagatgaaatcgcttccggtgtctttgctatcactcaacccggaaaacggaatttctctggggatacgttcgagtttgcaactgggacttctttacttccagatgcctatttagcactaggctatgtcatggtagcacaaactgtcgcgcttttaacatcggtgaaagttgcgaatacacctgacacgccttcaccaacgggaacagtcaatcgagtggtaaaaggcgtaacgattcatgactataaataggaattaactgggaggaagaaacatgcttacattaacaacaggtaaaaaagcggcgatggaccgtttatcaacaaaggatggcattatcagtgccttagcaattgatcaacgtggggcgttaaaaaaaatgatgaaagcgttaaatgtcgaaccaacggataagcatattgagcattttaaagaattggtatcgagcgagctgacaccatatgcgtcttcgatcttattggaccctgaatacggtctgcctgcagcaaaagtacgtcatgcagatgcaggtctattgctggcatatgaaaaaacaggctatgatgcaaccacaccaggacgtttacctgatctattagcggattggtcggttttacgactaaaagaacaaggtgccgatgctatcaagtttttactttattatgatgtggatgaagatcctgcgatcaatcatcaaaagcatgtctttgtcgaacggttaggcagtgaatgtgcagaagaagatttgccattttacttagaattggtttcttatgatgcgcaaatttcagatgctggttcatttgactatgccaaagtgaaaccgcacaaggtcaatgatatgatgaaggaattctcaaaaccgcaatacaaagtggatgttctaaaagtggaggtcccagtgaatatgaatttcgttgaaggctttggtactggtgaaatcgcttatacaaaagaagaagcggcaaactatttcttagaacaaagccaagcaacggatttaccatttattttcttaagcgcaggtgtttcaacggagctattccaacaaacattggtatttgctaaagaagctggctccaccttcaatggtgtgctctgtgggcgtgccacctggaaaaatggtgtaaagccgtttattgaatcaggtgaagctgctgctcgtgactggctgcaaagcgaaggtcgtgaaaatatcgaaagcttgaacaacgtgttaaaacaaacggcaagctcatggcatgacaaagttcaagtcgtagaagaagcagcggtgaactaggaggcgagctcgtgatagtaacagtaacgatgaacccgtccattgatatttcttatccactggagaaactgaagctagacacggtcaatcgaaccgatcaggtgagtaaaacagctggcggaaaaggacttaatgtcacgcgtgtcattcatgatttgaagggcgatgttttagcaacgggtgttttaggcggttttcatggcgcttatatctcggaagaattaaagaaagcaggtatcaagcaggcatttacagaaatccaagaggaaagtcgagattcaattgcgatcttgcatgaaggaaatcagacggaaatattagaagctggtccgacagtttcagaagcggaacagcaggcttttttggaaaattttcaggagttggttaaagaagccgagattgtcaccatttcaggcagtctggctaaagggctcccattgaatttttatcaaaggctcgttcaattagcggaagaacaagtggtaaaagtccttgtggatacctctggtgaaagcctgaggcaggtgttaaccggtgagcataaaccctttctgattaagccaaaccttgaagagctagaagctttattgggtcagccgttttcaattgatgatctagaagcgcttcagcgtgctttagctcagcctttatttactggtgttgagtggattgttgtgtcactaggcaaagatggggcgcttgcaaaatatcgtgattctttctatcgagtaacgattccaacgattaaaacagttaatccagtggggtcaggtgatgctactatagctgggtttgcctatggcttatcacaaaaaatgagcgtaacagaactgctgaagctttgtatggcagccggtatggccaatgctcaagaagtgcgaacaggtcatgtcaatctagcgaatgtggacatgcattttgaagagatcaacgtaagaaaggcttcgcgaactcgctcagcttttgagcaataagaccaaaatatttctaaattgccaagaaacacagtgatcgaagagaactgatgttgattggtacctacttggtgcttctcaaatttcgaaatatttttgcttattgccgaaaaagctagttcgtgaagccggacatggatatgcctgctgtaaaacgatttattcatgtgaaaattttatactttcttcatagtaaaaagatcgagcaataagctcgatctagtcaggattaattgttttttgagaccagttcaattttgtaaaaattccattttttataggattcaacatattccagcatttgctgtgtatcccttcgtttggtcacacggacttggagaacagttggttcatcagcagaaatctccagcagctttgctgcatctgaaggagtcgggaacttgatttcatttgtttcggtaaagtcttcttcgttcatatggatattataatctagcttaaagcgttgatagatggaattgtaatagctcagttcttgataattaggattcacatattgttccggcaagtaggtctgttgatagatatacggagtttcttcggctttgcgcaagcgtttgatgcagtaataaaatgctgtatcaggcaattcgagcttacttaaataaacgggatcatttcctcgtgtgattgataagacttgtacttgatcattacttataggaaacaactcaatatcggaaaattcgactatttttcctttacgggcgcgcgagacgaaagaaccacggccttgatgtcgaacaatgaatccatccttgactaaatcattcaacgcgcgaatgacggtgattgagctgacactgaacatttctgccaactcggcttccgtataaaatttgtcgccattttcgaatttgccagaaatgatttgctgttttagttcatcttttatgatttggtattttgggatgaccataggaacctccaaacaatgaataggaattaaaagtttcattagaattttttgattttgtggttatggcttgattttaacacattccactaaaataaggagagttgactttcagtatcggataatttaatatattaatatattaaaaacgctttcatttaaggagggagcttttgaaaacatttgagattaaagaagattttcttttaaacggcgagccctttaagatcatgtcaggagcaatacattattttcggattgacccagcggattggtatcactcactgtataacctgaaagctttaggcttcaataccgttgaaacatatataccatggaatttgcatgaaccaaaaaaaggtgagttccattttgatggaatactagatttggaacgctttttatcaattgcaaaggaactcgagttatatgcgatcgtaagaccatcaccatacatttgtgcagaatgggagtttggtggattccccgcttggctactaaacgaagacacacgcatccgaacaaatgaaatcggttatttaaaacatgtggctgattattatgatgtcctcataaagaaactggttcctcatcagttgtcaaatggcggaaatattttgatgatccaaatcgagaatgaatatggttcatatggagaagaaaaagactatttacgttcggttcgagatttgatgataaacagaggaatcacggttccgtttttcacttcagatgggccttggcgtgcgacacttagagcaggcagcatgatagaagaagatattttagttacgggcaattttggttcaaaggccgaagagaattttgcatccatgcagagtttcttcgatgaacacggaaaaaagtggcccctgatgtgcatggaattttgggatggctggttcaatcgctggaaggaacctgttgttcaacgagatgccgaggagttggcggaagcagttaaggaagtcttaattagaggcagtatcaatctatatatgtttcatgggggaacgaattttggttttatgaatggctgctccgcacgaggagtcattgatttgccgcaaattacttcttatgattacggggctccgctaaatgagcagggcaatccaaccgaaaaatatttcgcaattcaaaaaatgattcatgatacgtttcctgagattcaacaaatggaaccgttgacaaagaacacaatggaagtaaaaggaattcctttaagaaataaagtcagcttgttttcaactttagacacgatcagtcaaccggtgaaaacgacatatccagagacgatggaaatgctaggacaaaatactggctacattctgtatcgcacatcgattaaaaaggacgcggaagaagaaagactgagagtcattgatggtcgcgatcgtagtcagctatttctaaatcaaaaattacaagcgacacagtatcagacgcaaatcggcgaggatatcattgttccgatgactgaagaaaccaatcaattagacattttgattgaaaatatgggtcgggtgaattacggacacaaattatttgctgatacacaaaataaggggattcgaacaggagtcatggctgatctgcatttcctcactgattggtcgcagtattgcttgccgctggattcttgtgaggcagttgattattcaagagaatggcagccagagcagccaagtttttatcgctatgaagtagtgcttgatgaagtggaagacagctttatcgatctgtcgaattttggaaaaggtgtcgtttttgtcaaccaagtaaatatcggacgattttgggaagttggcccaacactatcgctttatattcctaagggattacttaaagaaggcaacaatgaaatcgtgatttttgaaacagaaggaacctttcaaccagagattcaattggtaaaaaaaccattatataaagaaatgaaagagggataacaatgagtattattggagtaagaattgacggacgtttgattcacggacaggtagcaaacttatggacaacaaaactgaatattacgcggatcatggtggtagatgatgaagtggcacaaaatgatattgaaaaaagcggactgaagctggctactccagcaggcgtgaagctaagcgtgctgccgattgaaaaagccgctaacaatatcttagcagggaaatatgattctcaacgtctattgatcattgcccgcaaacccgatcgtttattgaagctagttgagttaggtgttccaattgaagaaatcaatgtcggaaatatgtcgcaaacagatgaaacgcgttcaattactaaatcaatcaatgttgtcgatcaggatgtagaagtattcaaccaattacatgctaaaggcgttcgattgatcgcacaaatggtaccaagtgataaagcagaagacttcatgaatctattagcgaaataggaggataaataaatggatatcttatggtggcagatcttattattaacattatatgcagggtatcaaattttagatgaattacaaatttattcatcactgagtgcaccagtctttgccggattatttgccggcctagtaatgggcgatttaaaagcaggacttattattggcggcagtatgcaattgaccgtactaggtgtcggtacatttggaggcgcatcaaaaattgacgctaactccggaacgattctagcaacagctttttcagtagcattgggaatgaatccagagcaagcgatcgctgcaattgcggtaccagttgccagcttgatgattcaattagatattttggctcgttttgccaatacgtatttcgctcatcggattgataaattagtcgaagatatgaattataaaggcattgaacgcaacttcttgatgggggccattccatggtcattttctcgcatgattccagtctttctagcgctggcatttggtggaggcttagtcgaaaaggttgttgctgtcttgaatggtgatttgaaatggttaggtgacggtctatctgtagccggagcagttttaccagctgtcgggtttgcgattttattacgttacttgccggtgaaaaaacactttccttacttgatcctaggattcacgttaacagcgttactaggaacagtctttacgaatatgcaggttttaggcactggtgttgcgggtgttgtgaagaatttcgaaggcattttcaattcacttcctatgttagccatcgcattgatcggatttgctttagctgcgatcagttataagaatggacagatgattccaaattccccagcaccgaaagaagttgcttccaatgatttagatgaaggagagattgaagatgacgaaatctaattataagttgacgaaggaagattttaagcagatcaatcgcagaagcttgtttaccttccaattaggctggaactatgaacggatgcaaggatcaggctacctttatacaatcttaccgcaattacgtaagatttatggcgatgacacgccggaattaaaagaaattatgaagactcatacacaattttttaatacgtcaaacttcttcaatacaatcgtgactgggattgacttggcgattgaagaaaaagaagggattggcggaaaagacactgtatcagggatgaaggctgggttaatgggtccctttgcggcaattggggattcgatcttcgccgcattgattccaacgatttttggggccttggcagcgaatatggcgatcaatggaaatccaactggtatcttcatttggatcatcgcacaaatcgcggtaatgatcttccgttggaaacaactggaattcgcttatcgtgaaggaatctctttagttacaacgatgcagcatcgcttaactgctttgacagacgcggcaactttgcttggtgtcttcatggttggggcgttagttgccaccatgatcaatgtaaaattctcttgggcaccgagcattggtgatgtgacgttgaatatgcagaacaatcttgatatgatcttaccgcgcttattaccagcaggaatcgttgcagcgatttattggatgctaggtaaaaagaacatgacttcaaccaaggcgatctttatcgtattagttgtctgtgtggcattatcagcattaggtgtgatttctaaataagttaggctgattccaatgaataatgaggagcgaaccaatgggaaaacaattagttttagtgagtcatggactcttttgtgaggaattgaaaaagagtacggaaatgattatgggaccgcaagaaagcatccatacagtcagtttacttcccgcagagtcagcggaagattttcgcgcaaaatttgaagcagttattgcggatttagatgattttgtcgtgctggctgatttgatgggcgggacaccttgtaatgtagtctcgcggatgattttagaagggcaatcgatcgaactatacgcaggaatgaatatgccgatggtgattgatttcatcaatagtgaattgatcggtacagagcttgcattagtcgaatctgcgacaagtaatatttgccacgtgaatgaacggatcatcggtgacgatgatgacgaggacgagtaaaatctcatagaagatgatatagaggcgtcgtttatttgtgagtaggagctggtttgaaagtctaaaagactttcgaaccagctcctttttctgttctgctattatggtatgattgaggagaaaagaaagaatgggagattagagtggatttcaacgagaaactaaagcaattacgtcaaaataagcaatggacgcaggaagaattagcagagagactatttatctcacgaacagcagtttccaaatgggagtcaggtcgcgggtttcccagtattgattccttaaaagctatttcgcaggtttttgatatttctattgatgagttgctatccaatagtgaattgctgtcaattgcagaaaatgagcagcaacagcagcggaaaaactttcaacatttgcttttaggtatttcagattgcatggtcggcttattaattgttctgccgatttttggtcaagcacaagggaaccatattgcgtttgtctctttatggcaactttcgcaggaaacaattatcttcaagcttattattttttcattcgttattttaacaatgctgttcggcatttttgaactcgctttttctaggcgagaacaacgaattattggatcggtttctttgattttatcgttgttcggcgtactgcttttcatcatgactagacatccatacccggcaacgtatgtattaatgcttttggcagtgaaggggatttccctattaaatagccgttgatacgcatcgtcacatcaaggtgacggtgcgcttctttttgtttctggcagtctctgatacgttttatttggatagcttccaaataattgttaggagaggattagtcaaatgaaaatagcaaagaagcaattagaaacagccataggattattgatcgtctttattttatacacgatttctttatccttgttcgatgtacagaaaataggtccgcagcattcggaggtgggcttttctacaattaatcaatacgtatttcagaagataggtactagtgaattttggtatcaagtgacggaaatcttagggatttttccattgataatcgtggggtattttgctttacgaggatttttccaattgtatacccgcaagaagctcttactagtggacaaggaaattcttgcgctaggatttctttatgctggagtcgccgcttgctatgttctttttgaaaaagtcatcatcaattatcgaccgattttagtggatggacagctagaggcatcctatccgtcaagtcatacttttctggcgattacagtcttactgtcagctttttatgtattaagaaaggaaacaggaacgggaaaagcaatcatcgcctatgtgagcctggtggtcatgattgcgctggttatcggacgttttttgtctggagcccattggggaaccgatatttttggtggaattttattaggtctgacacttgccagctgctaccttgcaggaattgaaagtagttctaaacaaaaaaaaagaacgttgaaaactcaacgttcttagaagagccacctgtcgggcttgaaccgacgacctcttccttaccatggaaacgctctaccagctgagctaaggcggcatagttatttaacacaagatatagaatagcgaaaacaagcttatttgtcaactggttaaacagaaaaaaatgcggcattagctgctgtgaattctttatttataaacgagtcgtcgcttacgagcctgcgacgacttgtttatatagtttagagacgatatcattatatccctttggttgagtccagacatttgagagcagaataatgccattttgaccatcttttgaaaaatcaacaagggcttcaaaacgtgccttaactcctcgtgaatggtagttatttgtcatgttatagattccgctggcgtatttttcacctggatacgattgccataatgcagcacgttcttgtgttgttaaaaatttgtcctgataaagatcttgaaaatagctgtacaaatcctcccccgacataaacacattgcctgttcctaattcatctgcgtaagaagatacggtcgtaggagcgtaaacagggccggaggaactttctgagtatgaaagagcctgctgattgttcgtttctgaatagaagcttgtttctttcagcttcattggttttcttaaaagtttatcaaatagtgtgctgtagtcggtatgatagacttgctccaaaattccagctaacaaaacataattgaccggttgataggagtaactagaattcgcagccacagtcgtttgacgaattgtctctgaaagtattttttgtggatcagtagtgttcaaggcggcaattttcttttcgtcgatacgtaacccagaactcatattcagcatatctttgatagagattttctcactattagaaatttgcggataaaaggtgctgagcttttcctctagggaaattttaccagatttaaccgcctgcatgatcaaataggcagtttgtcccttttgaacggagccgatgcaatattgtgtatgaatcgtattgtggattcttctagcttgatctttccagccataagctttattcaaaatcacctgtccatgctgaaaaactaaaacagtaccgctaaaatttttttctaccaataactgctcaataccagcggacgtagcattttttggttcgattggttgctgattggtcaaatcagtagttgttttcgttgcaggtgtgctgctttttttcgttgcgtgatgctcaggatagctgtgttcagcatacattccgctgaatgctaggagtattaaaaaaagcggaaaaacaagtgttaatttatttttctttcttttttggtgcttgtgttttgacataataaatcctctaattctatttgaaatcgttccatttttatttcgataaaaattttcagcagttccatctaatttttgaaaattaggattgcatcatgaaataaaaattgatattatagtaaagtattcttccggcatagctcagttggtagtagcgcatgactgttaatcatgatgtcgtaggttcgagtcctactgccggagttttagagatgatcttttgatcgtctctatttttttacacctaaaaagtgaattttatatgaataaaaagcttaaatatgagtgaaatattgagaaaagcatgacctttttttaaaacgaagtcactctctttgaacctaataacaatcctcgttatactaatagcgaggagggattcgatggaaaaacgcgatgcctattttgacaacgcaaaacttttcttgatgatcttagttgtgtttggtcactttctacagccgtttgcaaatgatcatcctctatataatgatttgtactattttatctttaccttccacatgcccgcgttcatcctgatctcaggttttttcgcgaaaagtggaccaaaacccttgatgattttagtaaaaaaattgttgcttccctacattttctttcagttgttgtactccggctattacacgttgattggtctgcaggattccttcagtcttgatctgggaattccgcaatggtcattatggtttttattgagcttgttttgctggaacgtgcttttgcatttgacgcataaattttcagtaagacaggttttgatcgctagtatactgattgcactgctcgtggggtattttccaatttttgatcgttttttagcggttcaacgaacattgacgttcttcccttatttcatgttaggctacgtgattccgaagaattgggtcgaaaagctgaagacatatccgaaaaaatggatggccttactgctatttagcggattgtttctatttatacagggaaacgatttgatcaataagtattgggtctttggttcaaagccctatgaagactatctcaatcaaccgttactaggcggacctcaacgtttgatcttttttatagctgggttaatcggaatcgttgctttcttgatgattgtccccaaagaacggcactttttctccaattggggaaaaaatacgttgacggtgtatttgcttcatggttttttagtgaaaggcttgagagcccttgagcttgatttcgagatcagctctgtggaagttcttttattgtttatcgggagtatgttgctaacggtgatgctatcaagcaagcgactgggtcaatggatcgaaaaaggaaaagcagttttgcagcctagtttgtaaactaattgtctctttgcctcattaagcgtaaaatgaggggcaaggaggcgtttttatggcaaaaattacaaatgaacgaacccaagcttttcgaaaagcttttgaacaaaattctaaacaaatcgcattgcaacgaggcgtagtaaaaaatggtattcgggcctctgcggaaaatattcagacacatgtggaaaatacgccggtcttctccattgatctggctacaggaaaagtcgcaaaccaaaaacaatctggacgctgctggatgtttgcggcattaaatacgtttcggcacaaactgttgacgacctttcagctgaaggactttgagctttcacaaaactataccttcttttgggataaatacgagaaggcaaattacttctatgaaaatatattgaatacagcagatcagcctgtaacgagccgcgaggtggcctttttgctgcaaacaccgcagcaagatggtgggcaatgggatatgattgtgtctcttttccagaaatatggagtcgtaccgaaaagtgtgatgccggaaagcagcaacagttcaaactctcgcgatctaaataattatttaaataaattattacgcaaacacgcggttctgctccgtcagatgatcttggaagaggcgacagaagaagagattcaagcaaaccgtgaagcgatgctgcaggaagtctataatcttttggcgatctcattggggacaccgccaacagtgtttgattttgaatatcgtgatgaagaaaaaaattatcatttggatcaaggactgactccacaaagcttctatgataaatatgttgatgtagatttagatgagtatatcagtattatcaatgcgccgactgaagacaagcctttcatgaaatcctatacggtggatatgttaggaaatgtagtggatggtaaacaggtaaaatacttgaatcttgagatggaggatttcaaggcattggcggttaagcaattagagcaaggcgaatctgtctggtttggctgcgatgttggtcaatcctcaacccgcgacagcggaatcatggccttagatgcctatgatgtcgaagatttatttgacgttgatttgaccatgacgaaggctgagcgattagactatggcgaaagcttgatgacccacgcgatggttttgaccggtgtcgacttgattgatggtcaggcgaaaaaatggaaagtcgaaaacagctggggagaaaaagttggcgaaaagggcttttttgtaatgagtgacgaatggatggatgaatacacctatcagatcgttgttcgcaaagaatttttaacaccagaacaattagctgccttcgaggcagaaccaacagttctagcaccttgggacccaatgggtgcgttggcataaaagaaaaaaatctgagacagtgtggctgtttcagattttttttgaaacgccatttttacgaacaaaagcgttttcttgctgattatgctatacttttagcaaaaaggatgttgattcaacttttgcaaaaggcttaatgaggggattttattaagagaagtcgcttgcgaaatggataatttagttgaatgggagatgcattcggaaaatgaaaaaggaggttggttgaatgcctaaacatttagccgttcggcatgctgaaaatatgcgggaattgggtggttataagacaaaagatggacggaggatcgctcatcaaaaattgattcgttctgcaggtatcaatcatattgatgcgcaggataaacactatttaagtaaatacgggattaaaaaagtcgtcgattttcgttcaattgaagagcgagattctcagccggatcaggaaatacctgaagcgaaaaatattttcttgccaatttttccaatagaggaaactaagacagcttcggcctcgcctaggaaaatgatgcgtcggatgcaaaacggagaggatgcgcatcaacaaatggtcgaggtatacaaacactttgtgacagatgaccatgtgcgaggacagtatcgtaaattttttgatttagtcttggagaattcaagtgagaaggagagtctgctctttcattgtacggcaggaaaagaccgtacgggttttgcggcaatcctgttattaagcagtctagatgtcaatcaaacaaccatcacaaaggattatctagcaacgaatcgttatttaaagaaggctgtcgaagaaatgtaccaaaaagcggagaaagcaggtgtgcccgcggattcgttgaacggcattgaggatatgatgaaggctaaaaaggaatatctgcaaacaagcttcaaattaatcaaagagcaatatggaacaatgaataactttattcgtgatggaatcggtgtaacgaaacaagaaatcaaagacctgaagaaaatttatttgttgtaaggagctgacgagatggatgaactgctaaactatttacaattacaatcgaaagctgtaccgatcggcggcggagataccaatcaggcctatcgtgtaacagatggagaacgggattattttctaaaataccatcctcagatgtcagcggacttttttcaagctgaggttggcgggttggaagaattgagcaactttgtacgcgttccaaaagtttttcgacatggaacttttatggaaggggcttttattctgatggaatggatcgaacctggtgaaggggatcaaaaagatttagcccatgcattgagtaaaattcatcgagtaaaagccgattattttggttataaaaaaaataattttatcggcgtccttccgcaaatcaatacatttaccagagactggtgggacttctattttacctatcgtttggagatccaaattgaaattgccaagggaagaaatcattggacaacgaagcgagaacaaaattatcagttatttaaagagtgggtgtatcaaaaatggggtacaatgtcttttgaaccaactttattgcacggtgatttttggagcggcaacacgttttttgatacgcaaggacagcctgtatttattgatccggtagtgtcatatggccatcgggaagtggatctggccatgtcgcagctttttggcggatttcgtcgagagttcatcgacagctatcaagaaattctaccgatgcgtgccggttgggaagaacgactgacgatctatcagctctattatctgcttgttcatctgaatacctttggcgagagttatggggatgcggtagatcgtgtcttagctttaggaggaaagtaattgggaaaaagatacaccttgaatcatgaggtcgcctactatgagtgcgatatcaatcaaaatatgacgtttccggctttattaagcgttgctatcaaggcgtcttctgatcaaagcgatcaattggaacggggcactgaatacattaatacgctagggattacttgggtgattactcaaacggaggtaacaattgatcgattgccaaaagtcggcgagcagatcacggtcgtgactgagccaaccgaatttaatcgttatttctgttaccgcagcttttgggtttatgattcagaggaaacagaattgctgaagattgatatgtcctttgttttgatggatgttgaaaatcggaaaatgagcagtgtggatgctaaattaatggcaccttacgagtcaccgcaggttaaaaagattcgtcgctggcctaagatcgaaaaagttgagggtgaacaccatcagttatatcacgtacgttactacgatcttgacagcaatcatcatgtcaacaatgccatgtatttcaattggttgatcgatgtcttaggctatgattttatgacacagcatgaaccgacctatgtgaatgtaaaatttgataaagaggtattatacgggaacgatatcgaaagcttttatgaaattgttgaggcagaagaagtcaaaacccgacatgaaattcgtcttggcgatcaactggcctgcgaagcaaatattttatggcaaaaaagaagctgaatcgagagtattttcgatccagcttctttttgtcgtgttgcttagcaaattattcttccataaatcgcttcaattcttcttttgagagcttggcgttcaacgcgatcaataattttaaccgggccttttgactgttaatcccgttacagaagatcaccccatgctgagctaattctacgccgccgccatgataatcatagacaggttcagcaatcccgttgaagcagcgagagactagaacgatcggcaggcctttttccagtaaatgataaaaaggcggtaaggtttgcggcggtaaatttcccgcacccaatgcttctactacgagaccatccacagaaatggcttggtcaagtatcttaaagaactcgccctccatcccggcaaaaacttttacaatcggaatcatcgcatcaaaactgtcgatatcataacgagttgccttgggaagttcttgtttgaaaagaatctttgattttgttactaatccgatcggtcctagcgtcggcgtcctaaatgtggcgacatttgttgtatgggtctttgtcacatagcgggcactgtggacttcatcattcatgaccactagcacgcctttattgatggcactttctgaagccgctacacggatcgcacattcaaaattatagaggccatcactgcctaattcattgattgaacgcatcgcgccggtgagaataatcggcattaaatcaccgatggttatttctagaaaataagcagtctcttctaatgtatccgttccatgtgtgataacgacgctatcaatgccttcttgtttggccgctttaatccgttccttgagctggaacattgtttcaactgttatatgtggagaaggcagattagaaaagtcttctacgattaattcgatatcagcaggcaaacgtaattcttgccccgccgccagtaaaggatttttcttatcagggcgtacagcaccgtcagcatcctgactcattgagatcgttccacctgtatgtaaaatcaaaatccgtttcatcttcattactccattcgttattcgcgcattgcaatcatttttttgctatgtttattgtatactatgaagcaaggggaggctaggatactatgattcgaattggattaacttcttttaatgaacacagcagtctgacgggtaagaagacctcttctttgtatgagtacgctggttacttaccattggtagaattagatacgaattattatgggattaccagaaaaagttccgttgaaaactggctcacacaggttccggaggattttcgttttgtggtgaagctatatggcggattcacaggacaggcgaaatggcaagatagttatccttctatgactgcgatgcaggagcattttttagacaccttgcagccgatgatcgaaagtggaaagttattttgctttttagcgcaatttccggcacaatttaagtgtaccaaagaaaacgtcgcttatttagagaccttacgggaactattcaatgatttgcctgtggcgatcgaattgcgagactacagctggtatggcaaagagtttgttgaaaagacccatcagttaatgagaaccttgaactttagtttggtcatggttgatgaaccacagctacctgacactgtaccgttggatacgacggtaaccaatccgaatttcagcttgttccgtttccatggcagaaatcaggcctattggaatgatcgtacgggggattggcggaagaaacgtacgctttatcgttacaatgaagccgagctgaagatattaggagaaaaaatccagcaagtagccaaggaaacaaaagaagttggtgttatcttcaataataactccggtggggatgcggccgataatgctatgcaactgaaaaagcgtttaggtttggattacgaaggattaaatccgagccaaatcgatctattttaaaatgagggagaaccatgataaaagccattttttttgatattgacgggacgttgatcacaagtgattcaaaagtattggacagcaccagagaagcgattcgcctggcgcaaaaacaggggattttctgcggagtcgcgaccggacgagggcctgtgaggatcgaggaacgaattgaacagctgcctttggacgtctttgtgatgtacaatgggcaactggtgtacacgcgagaaaaggatatttaccagcgtccattttctgctgagacattgcagcgaatcgtggactttgccgatgacgaacatcggcaaatcatttttggcggacgtcgaagaatggatggcagccatttaatgaaatggtcccaaaattctttattaaaaaaaatcgccagctggatgcctaaatggtttcctgttagaccgacgagaagattgttgcaatccttcagtccaaatcgtcaaaaggggcggtacaaaaagctctcaattttacaggaaccgatttatcaatgtgtgcttttcagtgcagaaaatgaagcacaacgattgcaagaattactgccagattgttcgtttcagcggtctaatccttactcggttgacatcgttcccaagaatggctcgaagtatcacggcatcttggagtttacgaaagcagctgggattacgcctgaagaggtaatggtttttggtgatcactataacgatattgaaatgatcaaaaaagtcggtatcggagtagcgatggggaatggactggatgaggtcaaagagcaagcggattatgttaccgcaacgaatgagaatgatggcatttatcaagcaatgaagtatttcaatatcatttaaagagggataagtatgtcaaaagaaccatatcaaatggctaaagaatttcatgaaacctttgcgccagcgccacctaatttaccaaaagcattttctaaagaacgagggagcttccgcgcaggatttaaagctgaagagatcgtcgaattcttgtatggtgttgcagaaggtgatgaagcggagttttcggatttagttgagaagcttcacgaaagtgttgaacaggcaaaagaaaaggttttaaccaagggggaaaaggtcgaagatgctttaacggccgaagtggatgccctgaccgatttgctttattttacgtatggctcatttgcgctgatcggtgttgatcctcagccaatttttgagatcgtccatcgggcgaatatggggaaactctttcctgatgggaagccgcggtatcatccagtgactaataaagtgatgaagccggaggattggcagcaaaactacgcacctgaaccattgatcaagcctgcaaataaaaagtcaagcaaaaaattggaaagagagctatctggattgaaggcatgacaaatagaaccaccgataatcgctggtttcaacttatgctctcaaaaacaaaaatcattcctcttctgaaagtgaagccagatactcttttactcgaccgtaatatatacgcaaaaacttattcgcaccagcagtcatgtaaacatagtacggttttccttctgctcgtttcttagaaagaaatgcgtaaactggatcattttcgggtgatgttttcactaaaacgtccattacttgaaacagtgatttacgcagttgagcagatccacgtttagaagttcgtacacttttctgattataggtgctggattgattgacacctggatcaacccctgcaaaagcagtcaaggcgcctcgacgtgaaaagcggcgaacatcgccaatctctgccatgatctgtggacctaaagaaggacctacacctttcatagccataactacaggatattctggtaattgtgcagctgtttgatccatctgtaggcgtaactgctcaatagtcctagaaagagtgtttaactgttcaattgcttgcataattaagtttttggtcattttgtctttaggtaaaagagcaatcaactctttagaggcttcgaaaatttgcgctggtttatctggatggaagtcgtaacctttacgcacacagaacttccgataacgttcagtgaacacactcaaagagaccttgcgaacacaatcgacgtgccaaaaagaggcgacaaaatcaacccatttctggctgccatcttttcgaacaggactggtgaaaaaagtattcgctccaggaaaggtttgatccaaaagagcaatgagattatttttaagagcggtcttatgtttcatgtaaaaatcaaactgtcggttcatggtttttagttgatctcttgtcttgtccataaagcaatactgtcgtaggtcattccagttgtcaagagcgtaacgagcaattttgagtgcatcttttttgtcagatttcactttacgaagagaattgtttccaaaatctttaatgagttttggattgaccacactgacataaaaatccgcatccgagagccaacgagcaatgggttcgtgatagcgtccagtgtattccaagacgattctaacttctccttctaggtttgaaagagaatgaatgaagtcgtcgatggcactagaagtatgacagagttcaaagggactagagatcacttcaccgaaaggtcggagaatcgaaacaacacttttacctttagcaacatcaatacctactgcgttcaagacaatcagctccttcagttttgtcgcaatggaaagccagcgtaaacacattgccgattcaatctactggggtgtgacacgaacgtactggtaaacagcagttcaacctgcataaaacgaacgctgtgaatgagcagctggttggcagacttaatcacggacgcaaagtccaaggaggaatatgcccgaccattgccctctcattttaacagcttaagcaacatgatagataaaagggattactaatgggattagtagtaccttataacctataaatatattgtagtagaagaaatagacagacaaaaaggaaaagccgaaaagtaacggcttttccttttttaatcaaaaaatgtgtaataaagtgaacgtacagctaagcgttcttgctcactgcgaatggcgaagataatactgcgttcatcggcgccttgagagatcatccgcaaattgacatttttacgggctagagcagcggtgctgtcagaagttgttcctggccgctcgcgcatgccttcaccaacaagggcgactacggacagtccatgctcgatcgatagctgatccggttggattttctcttcgatctgcttcattaattctgcttcaatatcacgagtcaactggcgttctctcaggatgatcgagatatcatcaattcctgaaggcatatgctcaaagcaaatgttcagatcttcaagaatttgcaaaatacgtcgaacgataccgacttctcggtttaacaaatatttgccaaccgttattccgcagaagccgccatcactggcaactcccaccacttcattccggctaacattctcaaaggatttcttgattaacgttccttggcattcggggttattagtgtttttaataatcacaggaatctgtgctttaaaggccggcatcagggcttcgtcgtgaaaaacggtaaagccggcatacgtcaactcacgaatctcacgataagtagcatattcaatcagttcaggatcatggatatatttgggactggccgcgaaaataccatccacatccgtgaagttctcgtacaggtcgacctttaaacctgctgcaacgatcgaaccggtaatatccgatccgcctcgagaaaaggtacaaaggtggccatcagttgtgtagccaaagaatcctgggataattaggatatcttcagactcgcgccattgatagattttttcataggattcctctagaatccgggcgttttgcggttcattggagactgtgattcctaactcttttggattgatgtagcgagcacggacaccatttttttggaaacatgctgcgactaattgggcatttaaattctctccactggctaaaaagctgtctaaggcataaggatcggcttcatcaaagttttcctgcagctgccttaattcagcactaaaagtattctcaatatcgtcatcgacctgaaattctgccgcgatctcggtataacgcgcgacgatttcacggatcaattcgtcagtatcgtgtttgtaaacaacagcattataaaattgaatcaataagtcggtgacttttttgtctttattggttcgctttcctggagcagaaaccaccacgaaacgacggccggagtcgcctgtcacgatcgataagactttttttagttgttcagctgaagctacggagctcccgccaaatttgatcactttcactttaatcacctcttattttaatgtggctttaatattatctgaaaagttgcacaatttcaaggggattcgacgctttctcgaatagaaaatttgataaaattacacttttcttaaatttattgcaattgaagcagtcagcaaaaaatgctagtatgaggagtgactgtgcgataaacatttctaaagggatttcaaaactagctagtgaagagaaaagtcttttgtgttataatctacgttagatgttttcgccaaaaaactgataataatgaaccattaaataaactgaatctggatagttgaaaggaaaatcatacatgggaagtaatgtaatcatagggatcgttatcggcttagtcattttggctgccgttttatacttgattggttatctgatgaagaaaaaaaatcaagaacgcttaaaagaacttgataaaaggaaagaagcgttattcgatcttcctgtcgtggaagaggtcgatgaagtgaaaaaaatgcatcttgtcggccaaagtcaaaatactttccgtgaatggaatcaaaagtggacagatgtttcgacgaaatcttttgctgagcttgaaagtcaaatctttgaagttgaaagccaaaatgagaccttccgttttatgaagggaaaatcggcgatcgaaagcgcagagcgcacgatgactgagatggaagaagaagttgaaggaattcgtacaggattgaaggaattacgcgagactgaagaacgtaattcattagccgttcagcaagcgttagatgtttttgaagaattgaaaaaggatctgaaggaaaagaaagacagctttggacctgctttacctgagattcaaaaacaggtaaaaaatgtggaaatcgaatttacgcaattcgttactttgaatacttcaggcgatccgatcgaagcccgagaagtattggatgatgcagagaagcatacgtacgaagtacaagaaacgatgcaaaaggttcctgctatttatgaagatttagaaaaaactttcccaggccagatcgatgaactagaaaaaacttataagaaaatgatggctgacaattttgttttaccagaggatgatttcgaagaacgtctggataaagtgaagaagcatgttgaacgttcattagaggatttagagaaaatcgagttaggtactgtggaaacagccaataaagaaacggctgaattgatcgatgatctgtatgtcgtattagaaaaagaatttgaagcgaaaaaatatgttttaactaaccgtaaaacaatcggtgaatatattactcacgctgctcggaataaccaccaattgatggtcgagttggaccacacttctcagagctacgcattgaacaacaatgagttgggacgtgcccgcggtttccaaacagagattgaagaactggaacgtcgcaaccgcaatatggaaccacagattgacaaacatgaattagccttttccgaagttcaagtgttctataaggatgccttcaaagtcttggatgatattgaaacgaaacaagttgagattgatgatgacttacacgatttgcgtaaaggtgaaaaggaagcttctgagaaaatcgagaagtatgaattccgtttacgcaatctaaaacgctatgtagaacaacaacgtttacctggcttgcctggggattacttagaattcttcttcgtagcgacggatcgtgtggaagagttaagcaaatcattaaacaagattcggatcaatatgcaggatattaataagcttgtgagtctttgcgatgaggacatggaattgttggatcaaaagacctacgacttagtggatgctgcagcgttgacggagcaaatgatgcaatatgcgaatcgttaccgtcatactcatcctgaaatcaagagtgcgattgagaacagtttggaactatttaacagagaatatcgttaccaagatgccttggatgagattggcactgcgctagaacgagttgaacctggtgcttttaaacggattgaagatttctattttaacaaccgagatttagtctaagctgagcgatttgctcagcttttttactttatttcggagaaatgaagatcgacgttattggcaactgttaaggaagaggttatgaaactcttcttatttgtaaggattacttgaagtgttatgacattctcgctataataggaaagaatttttgaaggaaggtcgaagaatgatttattttgataatagtgcgacgacggcaatttatccatccgcacttgatacatatgtaaaaacgagtcaacggattatggggaatccctctagtctgcatgacttaggtacacaggcgaatcgtttgctgcagcaagcgcgaaaacaaacagcagacttgctgaatgtgaaaaccaatgaagtcttttttaccagcggcggcacggaaggggataactgggtactgaaaggtacagcgattgctaagcgagaatacggcgatcatctcattatttccagtgttgagcatccggctgtcagtcgaacagccgaacaactaaaagaacttggatgtgaagttagtatcgcaccagttgatcaaaatggttttgtaaaagtcgagcagttggctaagctgattcgtcctgaaacgattttagtttcggttatgggagtcaacaatgagatgggagcaattcaaccgatcgaagcgattagcaaagtgttggaagaccaccccacgattcatttccatgtggatgccgtacaggcgattggtaaagttgagcaggaaaaatggctgacaccacgggttgattttgctactttttctgcccataaatttcacggtcctcgtggagttggttttatctattggaaggaaggcaagaagctggcaccgttgttaaatggcggcggacaagaaagtgggcagcgggcaacgactgaaaatcttcctgctattgtggcgatgagtcgggctttgcgcctacaccttgagaaaaaggcagaacgaccaaaccacacagcagtcattcgtcaatacttaaaggaagcgttagctagctatgagaaggtaacgattttctctggcgatgaggattttgcgccgcatattttaacgtttggaattaaagggattcgcggggaagtgttggttcacgccttggaggaaaaacaaattttcgtgtcaacgacgagtgcttgttcaagtcgtaaaaaggtcgatagctcgacattacatgccatgggggttccccatgacattgccacgacggcaatccgagttagtttagatgaagccaataccatggccgaagcagagcaattcatggtgatattcaaccatctttacgacaagttttcgaagatcaattaagaccgcttcatgtaaatagtgattatggatgccagttgaagcattaaaagacaaagaaggtcaagaactgacattataaataaggagaatgatcgtgcaatatactgaaattatggtgcgctacggagagttatcaaccaagggaaagaaccgtcgcagttttatcatgcgactcgcacaaaatgtccgtggggcgttggcggaatttcctgatttgaaaattcatgctgatcgtgaccgaatgcatattttattaaatggtgaagacagccgtttggttttacctaaattagaaaaggtttttgggattcaaaccttctcgccaagtattcgcgtagaaaaaacacttgatgatttgaagcaaatgacgcagcaaatcatgcaagagatttatacgggaaaagaaacctttaagattactgctaagcgtagtgaccatcactttgaattggatagtcatggtatccagcaatatctaggagatgcagtaatggatgtttgtcccgatatcaaagcccagatgaagcgtccggatattaatttgcgggtagaaattcgccgtgatggggcttatctttcttacgaaacgatcaaaggagctggtggattgccagttgggaccagtggtcgtggaatgttaatgctgtctggcgggatcgattccccagttgctggttacttagcgatgaaacgcggagtggagattgaggctgttcattttgccagcccgccttatactagtgagcaggcgctgcaaaaggccaaggatctgacagaaaaattaacgccatatgttggcggaatccaatttatcgaagttccttttactgaaattcaagaagaaatcaaagcccatagcccacaaggatattggatgacattaacacgtcggatgatgctgcgattaacagatgcgattcgcgagatgcgtcatggattagtcattatcaatggggaatcactgggccaagtagcctcacaaacattgcatagtatggtagccatcaatgaagtgacgactacaccaattattcgaccagtcgtgacaatggataaaactgaaatcattgaactagcagaaaagattgatacctttgagttggccattcagccgtttgaagattgctgtacaatctttgcgccacctcaacctaagacacgaccaaaactggagaaagttttggaactggaggaacgcttcgatattgaagggttgatggcccgctgtttagctggattgaagattgaagagatcatgcctgctcgaacagagaaaaacgaagagttcgcagattttttataataaatttgagcaagaaagtgtactttcttgctcttttttttgtaaaagattgttattgttttttctacatgttaaaatcgtttatgtgaagtaattaacaaacaagagctcatagactaatatacggcgagagaatcgacctaattttttgctaaaaaaatgattacactaaaacgaacaaggatgtcagttcagcttttcgcagtattatagctcataagaaatagaaagctatgctcaaaacaagcaaaagaactgtttagcagaatgatatacggcgagagaatcagcctaattttttgaaaaaaaattattacattaaaacgaacaaggatgtcagttcagcttttcgcagtatctatagcttagaagaagtagaaagctattgtccaagtaagcaaaagaactgtttagcagaatgatatacggcgagagaatcagcctaattttttgaaaaaaaattattacattaaaacgaacaaggatgtcagttcagcttttcgcagtatctatagctcagaagaaataaaaagctatgttcaaaacgagcaaaagaaactgtttagcagaatgatatacggcgagagaatcaacttaatttttgcaaaaaaattaatacattaaaacgaacaaggatgtcagttcagcttttcgcagtatctatagctcagaagaaataaaaagctatgttcaaaacgagcaaaagaaactgtttagcagaatgatatacggcgagagaatcagcctaattttttgaaaaaaaattattacattaaaacgaacaaggagaaaaaacatggagcgaatcattcaaaaaccccaactatcgaaagcgacaactaaaagactgtctttgtatttacgttgtttgaaaggattggagaaaaatggtgttactcgcatcaaatcttccgagctcagcaaaatgactcaggtaggatctgcgacgattcgacgtgacttttcccattttggagagcttggccgcagtggttacggctacgatgtcaacgacttgattaaggtttttagcgacatgctggaaacgaaggaagaaaaacggatcgcattgattggctgcgggaacttaggccaagcgctgctaaataataattttcgtcgcaatgaaaatttgaatattgtttgtgcattcgataacgatcctgaaaaggttggcaaagagctgtgtggctaccttattcattcgattgatgagatggatgaggtgttggcggaagaaaaaattactgttgctatctctacggttcccagtcaaaatgctcaagcagcaattgaccaagtggttgcaaatggagtcacagccattttaaattttgcgccagatcctttaaaagtgccggataatgtccatgtccattatattgatttaacctcggagttacagacgttgatctattttgatggtcagtaggactttacaagtttccgagttcattgtagaatgagtcagacgatgatcaagaggagtatatgaggattaaagttctagagagaagatgcacggctgaaacatctttactttgactcatagaaggtagcttgggagttttgcgatctgaaagaagtaagaacgcacggtacatgtccgttacacatgttcgagcggcagagtctttttctgcaatttaggtggtaccgcgtaatttacgtcctagaacacagttgtgttctaggattttttttcgttagttctgcttttcgcaatttattatgaaggcacatcctagttaaaaaggttctgacgaaacatgaaacggaactgtttagcggattcgtatacgcacaaaaaagagtacctgttgctttgactaaagaagctgtaccagcaatcaatcttttaaaataggaggaatttaaatgactgaaaatttaccaacaaaattcaatccgcaagaagtagaagcgggtcgttaccagaaatggttagaccaagatttattcaagccatcagaagatcagcaagcaaaaccttattcgattgttattccgcccccaaatgtaactgggaagttgcatctaggtcatgcgtgggatacgacgttgcaagatatgatcattcgtcagaaacggatgcaaggctttgatacgctgtggctgcctgggatggaccatgcgggtatcgcgacgcaagcaaaagttgaagaaaaattacgagaacaaggtatttcccgttatgatcttggtcgtgaaaaatttgttgatcaggtttgggaatggaaagaagagtacgcaggacatattcgtgagcaatgggcgaagttaggcttatccctggattatagccgtgaacgttttactcttgatgatggcttatccgatgcagtgcgtaaggtttttgtttcgttatacgagaaggatttaatctatcgtggcgaatacatcatcaattgggacccgcaagcgaaaacggctttgtctgacattgaagttatccataaagacttagagggtgccttctatcatgtttcttatccgttaagtgatggcagcggtgtgttggaaattgcgacgactcgtcctgaaacgatgttaggagatacagcgattgctgtccatccagaagatgaacgctaccaagacttggttggtaagacagtaattttaccattagtcgataaagaaattccaatcattgcggacagttatgttgatcgtgagtttggaacaggggcagtgaaaattactcctgctcatgacccgaatgactttgaagtgggtaatcgtcatgatttgccgcgagtaaacgtgatgaatccggatggcagcatgaatgagctggccggcaagtatgcgggcatggatcgtttcgaagcacgtaaagcaatcgttgctgatttgaaagaaatcggtcgtttgatcaaagtcgaaaaaatggttcacagcgttgggcactcagaacgtacgggtgttgttgttgaaccacgtttatcaactcaatggttcgttaagatggggcctttagctgaccaagcggtaaaaaatcaaagtaccgataatgcggtggactttttcccgcctcgttttaacaatacctttatgacttggatggaaaatgtccacgattgggtaatctctcgtcaattatggtggggtcatcgtattcctgcttggtatcataaagaaaccggcgaaatgtatgttggcatggaagctcctgcggatagcgaaaattgggaacaagatccggatgtattagatacttggttcagttcagccttatggccgttttctacgatgggctggccggacgaagcaagtgaagattacaaacgctacttcccaaccagtaccttggtgaccggttacgatattattttcttctgggtaagccggatgattttccaaagcttggaattcacggatgaacgtccatttaaaaatgtgttgatccacggtttgattcgtgatgaacaaggccgtaagatgagtaaatctttaggcaacgggatcgatccaatggacgtgattgaaaaatatggtgctgacgcattgcgttggttcttatcaacaggttcagcgccaggtcaagatgttcgcttcagttatgaaaaaatggatgcagcttggaactttatcaataaaatctggaatgcttctcgtttcgtaattatgaacgttgaaggctttaccgctgaagatattgatttctctggtgagaaaactgtggcggatcgttggattttaactcgtttgaatgaaacgattgaaaaagtaaccagcctgtttgatcaatttgaatttggtgaagctggacgtcaattgtataacttcatgtgggatgacttctgtgactggtatatcgagatgagtaaagaaattctttacggagaagatgaagaagcaaaacaaacgacgaagagcattttggtttacgttttagatcaaaccttacgtctattacatccaattatgccttttgtaacagaagaaatttgggcgaagattccacatactggcgagtcattagttgttgcggactatccagtggttcatccagaatacaatgacaaaacagccgcaaaaggtatggaatttttgaaggaattgattcgttcagttcgaaacattcgggcggaagtgaatacaccactttcaaaaccaattactttactgatcaaaacgaatgatcaaaaaatcgatgaattcttaattgagaacaccagctatatcgaacgcttctgtaatccagaagaattggtgattgcaagcgacattacagcacctgacttggcgatgtcagccgtattgactggcgcagaaatttacttgccattagccggtttgatcaatatcgaagaagagatcaaacgacttgaaaaagaattggcaaaatggaacggtgaagtcaaacgtgtccaaggtaaattagccaatgaacgcttcgtggcgaatgcacctgaaaacgtggttgctgaagaacgagcaaaagaaaaagattatttagaaaaacaagcagcggttcaagaacggattgaaagtctgcggacgatttcttaattgattgatgagtgtgacctgtaatttgggtcgcgctcattttttatctgataatctcataactaaatttataaattggtggatttcctcagcacttatccatctttcttcaggaaactttgctatactagaggcatgcaaaaaaagagataaacgaggcgaatactattgatgatagaagaagcgattgcttggattcatagtcgtaaaaaatttggctcacgcccaggtttagaacgcatccaagcgttattagataaagtagataatccagaaaaaaaggtgcctgtgattcatattgccggaacgaatggtaaaggttcaacggttgcctacttacgcagtatcttaattgaggcgggggttactgtcggcagctttacttccccttacattgaagaatttaacgaacgaatcgccattgacgcccagccaattccagacaatcagctgattgtctatgtcgaaaaatatcagccaatcgtcgctgagcttgatcgagacccagcaattagcgggattacggaatttgagattttgacagcaatcatgctggattatttcgcgacagaacaagtggacgttgccatcgttgaagttggcttaggcggcttgctggattcaaccaatgtcgtgaaaccgattttgacggctattacaacgatcggatacgatcatatggatgttttgggagataccttaaacgagatcgccggacaaaaagccggaatcatcaaaaaaaatgtacccgtagtaacaggaaaaattacgaaaggtccgttgatcgaaattgtggaaaaggcagcgaatgagacagcaaaaatgtatcgctacggcgaagaataccaagtggattatttgcgacctgatgccacttggggcgagctgttcaattttaccgatcaagctggcaagcttacatcactgaaggtaccattattggggcgtcatcaagtagaaaatgccggagtagcgattgagctgtatcatctctattgtgaacaaaagggtctgccatttgaagagaagaccattcaaaaagggttgatgaaggcacaatggccggctcgaatggaaaaggtcagtgacgaacccttgatcgtcatggatggggcgcacaacggacatgcaatcaaacgcttagtcgaaaatgtaaaacgcgaatttcgcgattataatatcaatattctcttttcagcgttggagacaaaggatgttgaccagatgcttgcattgctttcagaaattcctaatgctcacatttatctgaccacatttgaatatcctaaagcgttggatcttagtcgctttgaccatctggatagccgctttgaggtggtttcattatggcaattcggcttaggagaattattagaggatatgggtgcagatgatttactattgattacgggctcattgtacttcgtttctgaagtacgtcaattattattaaatttaggaggtacgaatgaaaaaagttaagggaatcattttcgacatggacggcttattgtttgatacggagtcgatttactgcgaagccaatttggtggtagctgagaaatacggtctgccttttacgaaagagatttatgcacgttttatcggtatctcagatgaagaggtgtgggcagagctgcataaaatgtatgctgatcatggcgaggagacggtgcaaaaatttatcgatgaaagctggggaatggctcatgatcgtttcaaaaccggtgaggtcgatttgaaaccaggtgtccatgaattgctcgcttatttagaggaaaaagaaattccgcgggtagtggcgtctagtaatgtgcgaccgattattgaaattttactggagcatgcaggaattcgtgacaaattttcggacattatttcagctgaggacgtgaaatttgccaaacctgatccagaaatttttgtaatcgcgtcgaatcgcttaggacttgcgcctgaagattgcttagtgttagaggattcgaaaaatgggatcttagccgcagaaggagcggaggtgccagtagtgatggtaccggatattcttccgccaaccactgaattaaaagaaaaaacagaagcggttttctccaccttgcatgaggtaatcgactttttagaagcataaaattaactcctttgcgtactttaaagaaaagtagcaaaggagttttttatggaaaaaagtttgttattacaagagctgcctgaaagttcatggccgcgggagcgtttgcttagagaaggtgagaagcatttatcggatcaggaactactagcgattatcttgcgcaatggatcgcgtcagcaaaatgtgatggaattagcgggtagtattttgcgtgaatacccagcactctatgatctaaagcatgcaacgctgcaggagctgcagcaatttaagggaattggcaagacgcgagcaattgaattaaaggcgatgatggaatttggttatcgaatcaatcgcgcattacagccaaagatggggaaggttcaatctagtctttctttaggtcaacagttgatcacagaactaaaggattaccatcaagagcatttagtcgccttctttttgaatacgaaaaatgaaattatttcgcagaagacgatcttcattggctcgctgaatcagagtatcgcccatccccgggaaatttttcgcgaggcggtgcgaattagtgcagcacgggtggtattaggtcataatcacccctcgggaaatcccacgccgtcacataatgatttggcttttactgaacgtgttcaggagtgcggagcgatgatgggaatcgagttattagaccacattattgttggtgaaaccaaatatttcagtttgcgtgaagaaaagtacttaaagtagcaattgaaaacccttgcgcatagaataagtagaatgttaaactattattgtaattttgtttgagatacgagttggtatacagatgtttcccttttcgtaggccggcaatgttacacatacttaattaagtgcttaggcacgaggaggattttattcatggaaaacggaacagtaaaatggtttaacgcagaaaaaggttttggcttcatcactcgtgaagatggcagcgatgtattcgtacatttctcagctatccaaggcgacggttttaaaacattagaagaaggacaagcagtaactttcgatgttgaagaaagcgatcgcggacctcaagcagctaacgtaactaagcaataatacgacaaagccttagagaaaaaatctctaaggctttttattttggttctgatttgcttggtttctttcatatattttgcatatgagaagcagtaacgatttaattttccgtcgaaaattggaagaagcgatcctcttctaaattttcgacatgattggcattattaactgctaatgcggctttaccgatacagtattgccagaaaaaatcaaagaagaggctggtacttttttcaggcttaatggtattaaatatgtctctagtgacttgcttagttaattgaatcgtatcagaatcctgtagaaaaaagcgatagaattcatctgggtaatcggtggcataattggttatcgcttttgagagagcttgtagtgtctttggttcctgatcttccagaaaatcggcatatttcaataaaacgcgggtagttaaaaccgactttagctccgccagattcgcaaactcacgatagattggctgggttgaacaagcgatatgttgtgcgatattacgagcatgaaattttttgaagccttcattgataatcaattgataagcaccatctataatctggcttcgttgcacgcgttgagttcttaccataattaatcttcctttattttggattgaagaagctataaaataacacgtgttaatttatagctttttctaactaactttcattgtgcaaataaagcagctgattgtcaattgatttttgataatttcaagaaaataatacttttttttgcataaaaactgaaaattattttttatcggttagaaaatgatagtaagctcaagaataaaaaaacatccatctaggaaatcagatggatgtttttgtttaattatcaggggtcatgatcatcggtagaatcattggatggcgctctgtttgatcaaataggaacggttgcaaggcagctaccatcgcatttttcaatttagcttcagtacagccagcctcatttaaggcctctcgtaatgcatggaacaaaatccgttgtccttcattaatcatttcgccagattcacgcatgtatacaaatccgcgagacaaaatatctggaccagctaggatttcttttttctcaatatcaacagttgcgacagaaagaactaagccttcttctgaaagaatgcgacgatcgcgtaagaccacgttgccgatgtcgccgataccgctgccgtctacatagacatcactagcattgaaatgaccagctcgccgtgcgctgtctgcagtcaatgcaagcatatcgccattttccatgataaagcaattttcttcaggaacgccagtatcttgtgctaatcctgtatggattttcaacattcggaattcaccgtggatgggaacaaaatattttggcttcatcaggcgcagcatcagtttttgttcctgctgactaccgtgacctgaagtatgaatgttattgacttttccatgaatgacttcagcgcctgcttctgaaagcagattgatcaaatggttgacgctggttgtgtttccaggaataggcgagcttgagaagatcactgtatcatccggttgaatttggatttgacggtgcgtaccattagcgattcgtgaaagagccgccattggttcaccttgcgatccagtacataaaatcatcaattcgtttgctggcaaattgtttatttcatgtgcatccacgaatgtaccatcaggaactgtgatgtagcctaatttttgtccgttgacgatcgcgttttccatactgcgtccgaagacggctattttacgccctgttgccacagcggctgaagcagcttgctgcaaacgggaaatattggaagcgaaggtagcgaaaataattcgtccttcaattttttccataatgcgcaaaatggactgtccaattgtctgctcagatttcgtaaatgttggcacttcggcattggtgctgtcagaaagcaagcacaatacgccttcttctccaagcttagccattcgatgcaggttcgcaggttgaccgactggtgtaaagtcgaatttaaaatctcctgtttctacgatatttcctgacggtgttttaactacaacacctaatggatcagggatactatgagtcgtacggaaaaagctcacagacgttttgcggaaacgaatcacagaatcctcgtcgatctcatgtaattctgcatcacgcaataaaccatgctcgtccaatttattcttgattaaagccaaagctaacgcccctgcgtaaataggaatgtttgcttgtttcaataaatacggtacgccgccgatatgatcttcgtgtccgtgtgtaattactaatgctttaaccttattgaggttttggattacataactaaaatcgggaatgacataatcaattcctagtaaatcatcttcaggaaattttattccagcatcaataatgatgatttcatcttggaattgaaccccatacatattttttccgatttcgcccaatccaccaatggcaaagacaccagtttcattgttttttagcgaaagtttcatattagaactccattaacttgaagtcagcattctctttttcatattctaaatgattgccttctaaaagttgaatgtattccacgttatatggggtattttcgcgtaataaattgtgaacgatttcttcgttgtctgcttctacatacaatgagtgagtttgttcgcgttttgggttccgttctttggtttcttgataataaactttgtaaatcatgaatctatctcctttatttgctttatagcaattttttccacgacaaaatgaggggcggctgccacctatttttttatgctcgacgctttagcttatttaaagcgctgagaagaagcctcgtctttgcttcttgcttgaaaaaacaatttcaccgttctttgggttgttcttacaacaattacctgtagtttatcacagaataaataagaagtatagaaactaggaagggaaatgaggattccttagaaattttcagaaagtctaaaaaagtaaaagtagaaaaacaatttttcatgcaggcagaagtattttttttatgctatattggagacattacggtatagaaagaggcgagaaaaatgaagttaatgttgcgctataccttgcgttacaaaaagctattattatttgattttatcagtgtttttgggtttatcctgatcgagttaggactgccgacgattttggcaatgatgattgataagggaattggaaataacgattttaactacgtacagaagatggggatcctaatgattgcgatcactgtagttggaattgtcatgagtatttcgctgcgttacttcagttctcagatcacctctagaatggtcgctgcgattcgcgatgatctgttcgaaaagatccaaagcttttcccattcagaatatgaacagattggtgtaccctcattgattacacgcacaaccaatgatgcctatcaaattatgctgttcatgcagaatattttgactacaggttttatgacacccatgatgtttggcatgagcttgtatttgattatacgaacgagtccaggtttagggatatacgtgttgttggcgttgccgatactattattggcagtcatcctgatcgcaaaatattcggaaccattgtcaacgaagcagcaaaagaacctagataatattaacggcattctacgggaaaacctttcaggcttacgtgtgattcgggcgtttgtcaatgaaaaattcgaagaaacgcgttttcgcttagtgaatgatgcctatacgaatagttcaaaaagcctgtttcatttaatggcagtagcacagccaggatttttcttcctatttaatatcgtgatggtcttgatcatctggaacgggactgtgcaaatcagcgatggtgccttggcagttggaacgttaatcgcttttatcgaatatatttttcacgcgttattctccttcatgctgtttgctacagtgttcatgatgtatccgcgagcgaatgtttcagcagaacggattcaagaggtttttgatatggcaccaattatcaaagacaatcctgaaaaaacagcagaaccaacagaaagaggttcattggaatttcgtaatgtaacatttgcttatccaggtcactcagaaagtccggtgatacgcaatgtcagctttacggcaaaagcaggtgaaacggtggcttttatcggcagtaccggttcaggaaaatcgacattgattcaattgattccgcgtttttacgatgtgacggagggtcaggtattagtcaacggacaagatgtacgtgattatcaattgaaagatttacgggaaaaaatcggttatatcccacaaaaggcccaattatttactggaacgattgaagataatttgcgttacggaaaaaagaatgccacgcaggctgagatggagcaggcagctgaaattgcacaagctgcggaatttatctcgcagaaaccaaagggctatcaagaagaattagcagaaggcgggagtaatttctctggcggacaaaagcaacgcttggcgatcgcgcgagcggtgattcgccgccctgaaatttatatctttgatgacagcttttctgcattagattatcagacagatgcaaaacttcgtgctcgattgaaaaaggagacaactgaatctgtggtcttgatcgttgctcagcgagtgggaacgatcatgcatgcggacaaaattgtcgtgttgaacgaaggagatgttgtggggatcggaacacatcgggaattgttagagaaatgtccgatctattatgacatcgccgcatcacaattatcaaaggaggaattagcatgagaaacagcatttcttctttaaaacggttgatgcattatatcaatccatacaaaaagtctttcattattgtgctgatccttgcggtagcgaccttaattttggggacgtggatgccgtatctaactggactgccgacaacggaggtcagcaaaaatatcgcacagggtgaatctattaattttgattatgtctttaagtggctgatcgtgatcgtgattgtcggtatcgtttattgcggaacacagctaggaacgggttggctgatggccaatgtcgtacagtcagcgatgcgcgatttgcgggaggatattgaggctaagatcaatcgtttgccggtttcttattttgaccgcaatcagcaaggaaatattttgtcgcgagtaactaatgacgtggatgctgtcagcaacgccatgcagcaggcgatcattaaatcaattaatgcggtgttgggtatcttattagcagttgctatgatgttttatatcaatccgatgatggctttgatttcgatgattatgattccattatccctcgtcatcactcgaaaaatcgttcaggtttcgcaaaaggattttcaaggaatgcagaattctttgggagaaatgaatggttacgtccaagaaaatatgaccggtttcagtgtcttaaaactatatggacgggaaaaagaaaccttggcagggtttagtaaagtcaatcatgagcttcgtcgctttggtttccgagcttcctttgtttccagcttgatgcagccactggtgcaattgacggcgtatgcgacatatattgcgatggcgatactaggaagctggaacgttattcatggggtaatcttagttggtcagctgcaagcctttattcaatatatatggcaagtcagccagccgatgggagaaatcactcagctgtcttcaatgatccaaagtgcttcggcttcagctaaacgggtttttgaaattttggatgaaccagaagaagaattgaatgaccacgatctgccgttgccagaaccagtacaaggaaatgtggtctttgatcatgttcaattcagttatgatccgaagaaaccattgatcgaggatttgagctttgaagtaaaagctggagaaacggtagcgattgtaggtccaaccggtgctggtaaaacaaccttgattaacctgttgatgcgtttttatgacatcaatagtggaagaattctcattgatggggtaaacactcaagaaatgaatcgctcggatgttcgctccttattcggaatggtgcttcaggatgcttggctgtacgaaggaacgattggagataatattcgttttggacgtttagaggcgacggattatgaggtcgttgatgccgcgaagactgccaatgtagatcattttattcggacgatgcctagtgggtatgaaatggagatcaattctgagggagacaatgtttctcttgggcagaagcaattactgacgattgcgcgagcgattatttctgatcctaaaatcttgattttggatgaggcgactagttctgtcgatactcggttagaaggtctgattcaaaaagcaatggaccgtgtcatggaggggcggacaagttttgtgattgcccaccggttatcgacgattcgcgatgcggatcatattctagtcatgaaaaatggacagattatcgaacatggcacgcataccgaattattagcacaaggcggattctacgagcagctgtataacagccagtttatggaggaagcagaatagaacgtttagaggtcgattcataagcgttcagcattatgagtgtcgtttattcgtaaaaaggagctgagctgaaagtttaaaagacttttggctcagctttttttcctaattaaatttttgctgcaaaaggattttctaggttctcaaacgtaaactagaaaggaagaatttcacaataaatgctatacttatttggggaacgacttgtatcgaaataataaaaaacagagttgagcgagggaaaaactatggaaaattttattgcagacagtgcagatgtttacggtgatgtaacattaggcgaggggtccacaatttggtttcaaagtgttttgagaggtgacagcaatacgatttcgattggcaaaatgacgaatgtccaagatgggacggttgttcatgtggatcatgatgcaccaacagtgattgaggattatgtaacgattggtcatgcctgcattattcatggctgtacgattcactcaggggcgctgatcggcatgggggcaactgtgttgaatcatgcagaaatcggcgaaaatagtttgattggggcggggtccttagtaacagaaggaaccgttattccagccaactcgttggctttcggatcgccagcacgggtgattcgtcaattgacgccggaagaaattgaaaaaaatcgaaggaatgcgcaacactattttgaattgggacaggcttattcaaagaatacaatctctcgaattcagggagtcactcatgaaggaaactagtttcttattacttcaagcgcaattacgagcattgtttccagatgatggcttaaatcaattggctatctatgaagatcaagcggaacattttttgattttttctagtcggggactacatgtgttggaagaagatcaattaaccaaggaaccgcgaaatgtttattatcccgtagatagtttaaaaccatttgcaattcgtcaacaggctggaatctttgaattgatcatagaaactgtgggcggtagatcctttgtcttggcctttccagatcaagcagatgctcatcaagccatgcagacgctcattgaactgctggcttaaagacgaattagtgtaattttttcctgtatcccagtataatcttactaaaaggaagtgatgaaatggacggaagtaaatttgatcaagagccggtgaatgaagaagaattattgtcccaagggtatcgcaaatatcacggtgacggtatcgacatttactacaataaggatatttgcgcacacattggaaattgtgtacggggaaatccggaaatttttgaggtgggccgtagaccgtggattattcccgataacggcagcgtagaaaatgccagctatgtcgtagatacctgtccaagcggtgcgctgaaatacgtcagtaaaaattaaaaactgccaagttgtcagttcatggacgagtttagagaaataactatattacgaagatcagaccaatttttctataggaaaaattaatccatttattatgagtaaggatttcagttcctcttttcgcaggattacagctgaatcaagaaagatccaaaacagccagtcagagtccaatgaagtatagaggaatgacatacggcacgaaaatcagaccaatttttctgtaggaaaaattaatccatttattatgagtaaggatttcagttcctcttttcgcaggattacagctgaatcaagaaagatccaaaacagccagtcagagtccaatgaagtatagaggaatgacatacggcacgaaaatcagactaatttttctgtaggaaaaattaatccattttattatgagtaaggatttcagttcctcttttcgcaggattacagctgaatcaagtaggatccaaaacagccagtcagagtccaatgaagtatagaggaatgacatacggcacgaaaatcagaccaatttttctgtaggaaaaattaatccatttattatgagtaaggagcggtattatggaaatcaaagaagaaaaagagcgttttgtcttattgaatgatgaacaagaagaagcaggagaaatgacttggtcgaatgcgggtccagaaatcatgattattgatcacacctttgttgacccaacctatcgtggacaaggcttagcagaaaaactcgtggcagcgggagtcgaaaaagcgcgcaaggaaggaaaaaaaattattccgctttgcccatttgctaaaaaagaatttgaagaaaaatcagaatatgcagatgttttaagaaaataagtttgggacttctctagtcaaacgacgtcaattgtgctaaagtaaaaaatgaggtagtttggaaataaggaggatcatcttttgtataattttattttgggtgttatcttagttttgtcagtgatcatcgttatcacgatcatgatgcaacctagcaaacaaaatagtgctgcgagtgcttttactggtggcgcggatcaattattcggaaagcaaaaagcacgcggctttgaggctgtgatgcaacgatcaaccgcagttttaggtgcgatttggatgattttgctcttcgtattaatgtttttatcaagcaaataaaaccggcctctcacttgagaggtcttttttattttgtatttacactaaatcaagtacacttgaagataagcaagaaaaacagttgcttcagtacgtctgtctcgtttacgtaaaggcttaatgtgctgcttagatagaaaatatgcaaatcgagaaggaacgatcgtttttcgttttttcatttacctaattacaagataggagtgattactcatggtacaagtccctgaatcgctgtttttgcctcacggaaagcgagcggtcttattattacatgcctattcaggtagtcccaatgatgtgcgaatgcttgctcgctttttagaaaaattagattacacgatttatgcgccgctctttaccggacacggcacgtctgatccgctggatatcttacacgagcattctgaacaatggtggcaagacagtcaggaagcagtagaatttctacaatcaaaaggatttcaagaaattgcggtatttggtctttcaatgggcggtactttggccactcgcttattatgtgagcagcctgacagttttatcggtggtggttttttctgttcgccgatcgctccagtaaaaaccaacgtgacgaaaaacttcctattatatgcgcaacaagtgctagaacgaaatggtaaagaaacgacagaagaaaaaatcgaaagttatcgtccgttagtagaacaacaactggcgacgattgagaaacaagctcagattgcttatgaaaatctgacacaaatcaaaagcccattttttatggcacaggcgggaaaagatgaaatgattgaagccgatggtgtttttcggacagcagagcggctgcagcagacagctttttccttgaattggtatcccaaaagtggtcatgtaattactgtgggacctgaaagaagacaattagaacaagatgtggcagattttttagccgctcttggttggagagaaaataatggagagaaaaacaattaaagcagaaatattggctggattgaaagcagccaacaaaaaaagtctttcaatggaagaattagcagaaattttaaacatgcgtaaaagtgaggaatataaacttttagtccaaacagttgcgcaattagaacgggaaaaggccgtagagtttaataaaaaaggtcggattaaactgccttttcaacccatcgaagtagaaggcatctttcgtcggaatgagcgaggatttggttttgtcacgattgatccagaagagccggatatctttattcccaaagaagcgacgaattttgcgatggatggtgacatcgtcatgattgatatccaaaaaacggcggaccttttttccgatcgcggagcagaaggccgagtggtgtccatcaaggaacgaaaaatccaacaaattgttggagaatttaccgcctttgatgtcgatgaaatcgcggaatctgatctgtttggctatgtaacgccaaaagacaaaaaaagcgcgcaatttaaggtttttattgccgctgaagggattcagccagttgatggcagtatcgttattgttgagatcactcactatccggaaaagggctatgctactagcttggaaggtatcgttacgaaagtagtcgggcataaaaatgatccaggaatggatattttgtcaattgtaattgcgcaggggattccaacgcagtttccagatgaggtccagacagcctcagagcaagtacctgatacaatcgcggaatctgatttggttgggcgccgggatttacgggatcagcaaatcgtaaccatcgatggtgccgatgcaaaggatttagatgatgcggtaaccgttcgaaaattggctaatgggaactactttttaggcgtccatatcgctgatgtttcttattatgtaacggaagaaagcctattggataaagaagcctttgaacgaggaacgagtgtctatttgaccgatcgtgtgattccaatgattccgcaacgtttatctaatgggatctgttccttaaatccacaggtgccgcgtttgacgatgagttgtgagatggaaattgatccaggtggaacgattgttcagcatgagattttccaaagtgtcattcaaaccagtgaacgtatgacgtactcagcggtaaatgatattttggaagaagagaatccagaaacaatcaaacgttatcaagaattagttccgatgttccgtttgatgaaggagctccatcaaattcttgaatcacgtcggaatcgccgtggcgctatcaactttgaggaccgtgaagcgaaaattcttgtggattctgaaggacgcccgacagatattgaactccgtgaacgtggtgtgggggaacgattgattgagtccttcatgttagctgccaacgaaacggtggctgaacacttcaatcgtttgaagctgccctttatctatcggattcacgaacaacctaaagaagaaaaaatgcagcgtttctttgatttcgccgcggcgttaggtattttagtcaaaggaacaaagaatacgatcacaccgaaggatctgcagcaagtgattcatgatgtagaagagaagccagaagcagctgtcatcaataccatgttgctgcgcagtatgcagcaggcgcgctattcagaggataattatgggcattatggattagctgcggaatattacactcactttacctcaccaattcgtcgttatcctgacttgatcgttcaccgattgattcgctcttatagtaatgatcaaagtgaagcgacaaaagagaaatgggcggaagctttaccggaaattgcggaccatagttcgaaaatggaacgccgtgcggtagaagcagagcgtgaagttgacagcatgaagaaagcagaatacatggcggataaagtcggtgaagagtttgacggtatcatcagctcggtcacaaaatttggtattttcattgagctaccgaatacggtcgaaggaatgatccatttaaatgagctaaaacaagactatttccactttattgaaaaccaattagcattagttggggaacgtactcgacagacctttaagattggtcaaaaggtccgagtgaaagtcacaaaatccgatcctcggactagagagattgattttgagctactagaagcagaagaaatccctgcattagaggtgccaggaaataatcgtcgcgaccagcgccgtaaaccaactggcggacgcaaaaataataaaaaatctgaaaagaattatggtaaaggcaaaaattcagatcgccaaaaaacaacaggtaaagacaagaaaaagaaaaaaggcaagaagcctttttataaatcagtagctaaaaagaaaaaaacaggtagaaagaagggataatatgccaaagggtgaaggcaaattagtggcacaaaataaaaaggcacgccatgattatacgatcattgatacgatcgaagcagggattgttttgcaaggaacagaaatcaaatcgattcgcaatagccgaatcaacttgaaggatggttttgcacgaattagaaatggcgaagcctttttatacaatgttcacatcagtccatacgagcaaggaaatatttttaatcatgatccggtacgcacacggaaactgctcatgcataaaaaacaaattgctcgattagctggtgaagttaaaaatacgggaataacgctggttccattaaaggtctatctaaaagatgggtatgcgaaggttttgataggtgtcgctaaagggaaacatcagtatgataaacgggaaagtttgaagcgcaaagatgtcgatcgtcagatcagtcgaacgttaaaaaattattctcgctagtaaaatattctttttcgcatatttggtgagaatttctttacttcacaatggattttgataggattagttacaatctatactagccattttgtgggctaaattaacgattggagccgtttaactcaaaataaaataactatttaaaaaaagaatgcgagttattcgaaaaatttcaagaaaattctttgaaattttctttctctggtggtaacatacgatagtattttgaggagcagcgctaagcagccacgagctgacgcgagtcgctgggaagagaggtgaactgaattggatgaaaaatcttgggttttccatattggtcccgtatggttcgatggtacggttacgacaatgatcattttgacatgtgtgattgtcttcttgctggtttttacatttacccgcaacctatcattgaagcccaaaggaaagcaaaacgcaattgagtgggtcattgattttactacgaatattgttggcgacaacatgcctcgtaaagaagtcagaaattttagtttgttctcatttacgttgttcttatttatttttgtagcaaaccaaatcgggttagtcacaaaaattgtcacaggtgacgaagtgacttattggaaaagcccgactgctaacccctttgtaaccatgggattggccttactcgtattagtattagccaattacctaggtacagaaaaattaggtctaggcagctacattaaaaattcttttttcacacctgcaggattatttcctattaagttgatggaagaatttacaaatgttattacgttgggcttacgtctatacggtaacattttcgctggtgaagtattgctttcattgatcgcaagcatggtgacaagcacaggatggtggacattgccatttgctatcccgcttgaaatgatttggatcgcattctcactatttatcggtagtatccaagcgtttgttttcactactctatctatggtttatatcagtcataaaatcgaggtagaataataaaaaaatttaacacacttttaggaggaaaattattatgaactttatcggtgcaggaatcgcaatcatgggagccgcaattggggctggctatggtaacggacaagtaatctcaaaagcaattgaatcaatggcacgccaaccagaaatgtcaggtcaaattcgttcaaccatgtttatcggtgttggtttgatcgaagctgtgccaattctaggtgtcgtattaggtatgttgatggttttccaaggttaataatcgacgcttttttgttgagactcatcccaaagatgagcaacagaatcgtataacgattttgtcatgagaaagaacagaaaggaagaccgagtatgctgaatctagttattgctgaggctgtcaatacaacactcggtaatttaatcgtcgttacgttatcattcgtgattctaatggcgctattaaagaaattcgcgtggggtgccgttcaagacattctgaaaaaacgtgaagataagatcgccaatgatctagattctgccgaacaatctcggatcaaagctgctgagttagaaaaagaacgcgaaactcagttagcaagttcccgtagtgatgcggcagatatcatcaaaaatgcgaaagaaagtggcgaactaagccgtcaaaacatcattaaagatactaaagaagaagtgactcgtctgaaagatcgcgcacaagcggaaattaaggatgaacgtgaaaacgcgttgacttctgttaaggatgatgtggcaacactttctctacaaatcgcagaaaaaatcttgagcaaagagctttcgcaagacgctcatcaagatttgatcaacgactatatgaataagttaggtaatacgaaacatgaagcttgataaatacactgttggtaaacgctatggaaaagctttgtttgaattggcgatcgaaaataaagccgccgacaccgtttatcaagagctgttgactgttcgagaaatctgcaaagaaattcccgatcttggaaatattttaacggatgttcgtttagaaggcgctgaaaagaaagccattatggatgctttcaccggcggttttgacggcatcgtcaaaaattttctattagtagtatttgaatataatcgtagtgacgatctgccatttatgattgacgagtttgaacgtcgctatgatgaacgcaataaaatcgcacacggaacagtcactacggctgttccactctctgaagaaaagaaacatgaacttgaagcaaaagtcgctgatgtttttggctaccagaaggccacgttaaccccgatagttgatgaatcaattctcggcggtgtcattgttgaagccgatcatcaagtgatcgacggcagcctcgccagccaattaaatggtctacgagcagcacttagtaaaaagtagagaagaagaggtgaaatgaatggccatcaaagcagaagaaatcagtgctttaatcaaagaacagattcaaaattatgacaataagttgtctgtggaagaaattggaacagtcacttacgttggggatgggatcgcccgtgcccacggtttagaaaatgcaatgagtggagaacttttagagttttctaacggctcttatggaatggcacaaaacttagaaagcaatgatgtcggtatcatcgtgctaggtgaatttgagtccattcgtgaaggagacaaagtaaaacgtaccggtaagatcatggaagtgccagttggcgaaaacatgatcggtcgtgttgtgaacccgcttggtcaaccagttgatggaatgggtccaattgaaacaacaaacacacgtccagtcgaagcaatggctcccggcgttatgcaacgtaaatcagtatcagaaccaatgcaaacaggcttaaaggccatcgacgccctagtaccaatcggacgtgggcaacgtgaattaatcattggtgaccgtaaaacgggtaagacgtccatcgcgattgatacgatcattaaccaaaaaggtcaagatatgatctgtatctatgttgcaattggacaaaaggaatcaacggttcgttcacaagtagaaacacttcgtaaatttggcgcaatggattataccatcgtcgtaacagcgggggcatctcaacctgcaccgctattatttatcgcgccttacgctggaacagcgatgggtgaagaattcatgtacaacggcaagcacgttttagttgtctttgatgatttatcaaaacaagccgttgcttaccgtgaactgtcattattactacgtcgtccgccaggtcgtgaagcgtacccaggggatgtcttttatttgcactcacgtctattggaacgtgcggcaaaactttcagatgaattaggcggcggttcattgactgccttgccattcgtagaaacacaagcaggagatatttcagcctatattcctactaatgtaatctcaatcactgatggacaaatctttttagaaaatgatttgttttatgcgggtattcgtccagccgttgatgccggtctatccgtatcccgtgttggtggttcagcacaaattaaagcaatgaaaaaggttgccggaacacttcgtttagatttggccagctaccgtgaattagaagctttcactcaattcggttcagatttggatgcagcaacacaagctaaattgaatcgtggacgtcgaacggttgaagtattaaaacaaaaattacatgcgccactgcctgttgaaaaacaagtcgtgattctttatgccttgactcatggcgtacttgatagtatcccagtcaatagtattttagattttgaagcgcaattattcgaatatctggaaaccaatcactcagatttatttgcaacgattcgtgatacgaaagaattgccagatacagataaattagatgaagcaatccaagaattcaaagatatttttgacgcttcttccgctaaccaagaaaaagcataatcgaggtgaaaaaagatcatggcatccttaaatgaaatcaaaacacggattgcatcgacgaagaaaacaagtcaaatcaccaacgctatgcaaatggtctcagcatctaaattaacgaagtcagaagcctactcagcgaaattccaactttatgcttcaaaagtacgtgaggtattgacgcacttaacagcgagcgaattaactgagttagcaaactctggtcgtgaattaggcggcatcaattatcacagcatgttattgaatcgtccagtcaaaaaaactggttatatcgtgattacttctgatggcggtttggtgggaggctataacagctcgattttaaaacaaaccatgtcaatgctcgaagatgatcatgattctgctgatgagtatgttttgttagccattggtggaaccggagcggactttttcaaagctcgcggcgttaaattagcttatgaattacgcaatttatcggatcaaccaagctttgatgaagtacgaaaaatcgtttcgatgacgaccagtatgtatgaaaatcaggtctttgatgaactgtatgtttgttataaccatcacgttaattcactatccagtcagttccgagtagaaaaaatgctgccgatctctgacttggacccaagtgaagcacaaacgtatcgtgaagaatatttgtttgaaccttcaaaagaagccatccttgatcaactacttccgcaatatgctgaaagtttgatttatggcgcgatcgttgatgctaagacagcagaacatgcagccgggatgacagcgatgaagacagcgacagataatgcaggtgcgatcattgatgatctaaccatttcatacaaccgggcacgtcaagcggcgatcacccaagagattactgaaattgtcggcggggcttccgcattagaataatttcaagattggaggaaaaaacatgagttcaggcaagattgttcaagttattggtcccgttgtcgacgtggaattttctttagatcaatccttaccagacatcaacaatgcgttgattgtttacaaaaaagataaaacaaaagttgttcttgaagttgctttggaacttggtgatggtgttatccgcacaatcgctatggaggctactgatggattgcaacgtggaatggaagttgtcgatactggcaaatcaatctccgttcctgtaggtaaagatactctaggtcgtgtgtttaacgtattaggtgaaacgattgataaagaagcaccttttccagaagatgcagaaagaagcggcattcataaaaaggcgcctgcttttgaagaccttagtacaagtaacgagattttggaaacagggatcaaggttatcgacttattagccccttatttaaaaggtgggaaagtcggactattcggtggtgccggtgttggtaaaaccgttttgatccaagaattaattcataatatcgcccaagaacacggtggtatttcagtgtttaccggtgttggggaacgtactcgtgaagggaacgacctttattatgaaatgaaagactctggcgttattgagaaaacagccatggtgttcggacaaatgaacgagccgcctggtgcacgtatgcgtgttgccttgactggtttgacattagctgaatatttccgtgatgaagaaggacaagatgtgttgctatttattgacaacatcttccgctttactcaagccggatcagaagtttctgccttattaggacgtatgccatcagccgttgggtatcaaccaactttggcaactgaaatggggcaattacaagaacgaatcacttcaaccaaaaaaggttcgatcacttcaatccaagccatttacgtaccagccgatgactattctgacccggcaccagcgacagcttttgcccatttagatgcaacgacaaacttggaacgtaaattaacggaacaagggatttatccagccgttgacccattggcttcatcttcaagtgctttggctcctgaaatcgttggggaagaacattatcgtgtagcaacagaagttcaacgtgtcttacaacgttaccgtgaattacaagatattattgctattttagggatggacgaattgtctgaccaagaaaaagtcatcgtatctcgtgctcgtcgaattcaattcttcttgtcacaaaacttcaacgtagcagagcaattcactggtcaacctggttcttatgtaccagttgaaaaaacagttgaaggctttaaagaaatccttgaaggaaaatacgacgatcttccagaagatgccttccgtagtgtcggcaccatcgaagacgttatcgaaaaagcgaaaactttaggctactagaaagaggtgcacgatggaacaagaaaaaaacaaagttctgcaagtgaacgttgttactccagacggcaacgtctatgatcataatgccaccatcgtcgttgctaaaacggttgctggtgaaatcggtattctaccaaaccatgcaccgatcattgcacctcttgcgattgatgaagttcgggttcgtcgaacagattctgatacacacgtggactggattgcagttaacggtggaatcatggaagttcgtgacaacgtgttgacaatcatcgctgatacagctgaacgtgaacgtgatattgatgtgtctcgtgctgaacgagcaaaacaacgtgcagaagcgagaattcaagaagcgcgtgaaaagcaagataccgaccaattaagtcgtgccgaggttgctttgcaccgtgcaatgaatcgaatcaaggtttcgaaacatcgttaattcttttacaggttgagccagaaataatttttggaacttgtgaatacaattttttagtgctgcaaaagctattgatatggcttttgcagcatttttttattttgtcaaaatacaggtaaacaagatctgttatagcgagtattttccagatcgactttttatcgttttctacgcagtatgtgattgtcaatgaacggatttaattgggaaaaggcttattcccgcggtgtatcaggcggtccatctttgtttttctttctgattctgtgaagccattgaagcagtctgttttgttctttcgtgtcttggtttgatgactcgtcttccattaaaggcatagctactggctgctgttcgttaagctggttattgcttgattgtggaagcgactttttttctactttgatcgttgctttttccgctggagcgatagtcgttaattgtttaaaatagcgaccatgtggtgtttctggtaatagggaagatttcggaatcggtaaagcgactccttcttcctgtttttccgcaacttcaaagcaaccgactttttcacaggccgcttcctcaacaggctttccatcgtaacgaacgccttttgtctcctgttctggatcaaatatcagagtttctttatgggtcaagaccttagcggtgaccacagaatcaaatagttttacgccgttttgtgtacaaatgtctaggttcgtcaatagttcgcaagcttctttgatctgtggcgccgtcaaattgggatcgaggtctttatatttccaattgtgggtgccgccatcgctttttccaaaggtggcaattaaatccttggtcattgttctgttcctttctttgattttttctgcgtaggttggatcatggtttcatcaaggttcgctggtttcttcaggtcggacgattgacataagtgagcgagcgacagagacgactttttcaccgaatttttttactggaaagactctcagtttcaaagtcttccattcgggtgccataaagtagtcttcgaaataataaaagagacgcttcatggtgcgggtagctttggtgtgcatgaacacctcgcggacaagatcctttagaaagtgatcaaactccgccgctcccaattggcagcgtacttttaaggctaaaatatatttaatcgtgacactgctgttttgtgtttcatggtagaaattggtgattcgttgttcgagtgttttggcttttaagttgaataactgccgaaacgacagtgtttgtataacattcattgatgctcatcctttcattctcaattagtagtagaggagggcggcaagactgccgctacccctcaaagtgtttgattaaaaaataatcgtttcaatcgtttcgacgtacttcgcactttcgacagtgttgaagaggtctgcgccatctttatggcaaagttttacctctgtcatgcgttgcagtaatcctttgatctctgtatcggtcttttgagtatcgggatcattgaagctccaggtgtggttcttccctaagctgtttttaaaggttgcgacgagttttagcatttttttccttcctttctatgatttatttggtgtagcgtgattgactggttagaatcacgccgtctagctggctgccttcaactgatagtgatttcataatttcacccagttcaaggaccttctcttcgctaggctcatccatcacatttgtaaaggtgatcttcttagttttttctccgcctgcatcgatttctacttgtagtttattgccgatcgtttgaatcatggttgtttcctcctaatttttttggttccggccggtgactaaaagataaatgatttctaaaaaaagtgcgaatcgcaaattgaccaaaagggggtcaatttgacctgtttttgggtaaaaagtgctgtttttgatgaaaaagcggtcaaattggaggtataatggtcaatttgcgattttacaagcaggagcgaaatgtagtataataaaagttttaataaaacacttcattaactaattgttttaagagaaagctcgacgcccatcgaaatgaattaaaagctgaagtcagtaataaagtgaaaagaaatagtagagaaatttgttgcgataaaatggtaactaggacgcaagcgaagacaaaaggtcaatagcataatcaagacagtaaataagagatggcaaagagtaatagaattgtccccttgaataaattttgcggacagatataggcgagaagaagttttaaaaaatctgtcattttaatcttcaatcgaaaaacggaataaaaactattatcaaaaataggtcgattattagaagattgcggaaaaatgtgtaaatgatttttaaaaagactttctaaggggaaaaagatttatttttgatcggatcgaaagagaaaaataaacattaagttttttaaaagtttctgtatagttctttgagcattcaaagtattcttctttacctgaatctgtgatataatccaactgttgatttttttgaaaggaacgaagttatgcaagtatatggaattgatgcaatcgttagaattgtctcgcatttttcctttatctacctggctttctgggctttaagatcgttacgaatagagaatctctttaaagcatttaaagaaacgcaagttcgtctggcaattttgatgctggcgatcgcaatcggctttacttgcagtacatttttcttagaaatcattcttttgtgcaaaaatatctttttgacatttaattaagtaaggtacatatacgaaataatcgactagcattttttggagggaatacaatggaagagatcatcgttcgtggtggtaaacaattagaaggaacagtacatatcgaaggtgcaaaaaatgctgtgctaccaattttagctgcgacattattagctgaagaaggaacatccactttgagtaatgttccgattttatctgatgtctttaccatgaatcaagtgattcgttatttgaatacagatgttgaatttaatgaagaggctaaagaaattaaggtgaatgcaacacgtcaattaaacgtggaagctccctatgaatacgtaagtaagatgcgcgcatcaattgtcgtaatgggtccgctattggctcgcaatggtcatgctaaagttgcaatgcccggcggctgtgcaattggcaaacgtccaattgatctacatttaaaaggtttccaagcgttgggtgccaaaatcattcaaaaaaatggctatattgaagctattgcggatgaattagttggggatacaatttatttggatttcccaagtgttggcgcaacacaaaatattatgatggcggctgttaaagcaaaaggtacaaccgtgatcgaaaacgttgcgcgtgaacctgaaattgttgatttagcaaatttcttaaataaaatgggcgctagcattcatggtgctggtactgaaacaatgcgtattgaaggtgttgaccatttacatgctgtatctcatccaattgtgcaagatcggattgaagctggaaccttcatggttgccgcagcgatgactgaaggaaatgtgttgattgatggggcaatccctgaacacaaccgtcctttgatttctaaactgatcgaaatgggtgttaagattaccgaagaaaatgatggtttgcgtgtaatcggtcctaaagcattgaaggcgacagatattaaaacgatgcctcatcctgggttcccaacagatatgcaagctcaaatgacagctattcaattagttgctgatggggtcagtacaacgactgaaacagtgtttgaaaatcgtttccaacatctagaagaaatgcgtagaatgaatgcacaagtcaaaatcgacaacaacgttgcattgattaaaggtgcttcacagctgcaaggggcagaagtgtatgcaactgatttacgcgcagctgctgcattagttttagctggattacgtgcaaatggtataacacgtgtacgtaacttgaaatatttagaccgtggatactatcaattccataaaaagctgcagcaattaggtgcggatgtcgaacgtgtggatactgaaagcagaaaagcaacggatgctgcaactgtcttagtttaaggatttcagttcctctttttgcaggatattagctgagtcagtaaaattaatccattacgtatgaataaggagtggatctatgagttctggagaacatatcttacgtagcttaattcgtattgtagcaatcctacttgcaggtgttttattatttatcgtcggcagtatgattggttatggtgcaatgggcggcggaaatccatttaaagtgcttatgccagatgtttggcgtcatattttagagtttgttcattagtattcgtgataaaaatctgattttgattattcagaagggattgtagccaagttcttggtgcagtctcttttttattgaaattatcacgtgattgggattacagaattactgttcatcatgaagtttaaattttgatgaccaacgaaatacgtatcttgctttattttgtaagaacagtaaaatggtatggagctgattgattaccaagaattgttttgaggtgtaggaatgaatattattagcaaaggtttaattggtttggttcgtggttatcaacggtttatttcaccgctgacgcagccgtcctgtcgttattatccgacatgctctagctatatgattaaggcaatacaggttcacggtgccttcaagggttttctaatggggatttcacggattttacgttgtcatccatttgcgaaagctggttttgattatgtgcccaccaaattttccttacgtaaaaacctgattgatcaagaggaaccagattatgaaaaactacataaacaggcttaaacaggcttagaagcaaaaaggatttttaaatcgtcaatatttaactaagagaaagaagagcaaaactttttgcggagttattctatagattagagaaagcttcctcatttttctccttttgtcgataaatcgacgttaataatagaaaaatcaaaatccttttctccataaatctgttgctttatcaattggtggcagatgcagaaaacaaataaacatagttattttaaagaaatctcattgactatttatcagttaatgtgatttcttttttcgttatttgaaagattcagcaagcagttgtaagcgctataaattgtttgagtattgctgaattattaaaatattcagaaaatttaattgacagtgagagatttttcctatatattctttattatcttaacgaattatcattattttatcagggggtaacgggatgaaaaaaagaacagtagctgtaatggcagcaggattgtttttactaggtgcatgtggatcgcctaaagcgagcgatagtggcggcagtgacgatgctaagacgattaaaattggcggaaacttcgagttatctggagctgtagcggcttacggcgaagcggaaaacgaaggtgtcaaattagcagtcgaagagattaataaagatggcgggattgacggcaagaaaatcgaatacgtttcaaaagacaataagtctgataataatgaagcagcttctgttgcagcaaatttgacgactaaagatgaagtagttgcaatcgttggaccggctacctctggtgcgacaaaagcgacattgccaaatttaaccaaagcaaagactccagcagtaacaccatcaggaacagatgatgcgattactgttcaaaaaggaaaagtacaagattatattttccgatcttgcttccaagatagtttccaaggaattgttttagctaaatatgcagatgaaaatcttaaggccgataaagccgttattttaggcgataattcaagtgactatgcaagtggcttgaagaaggcttttaaagaaacctataaaggtgaaattgttgcagaagaaaactttactgcaggagataaagatttccaagcaatgttgactaaaatcaaagacaaagattttaacgttatctacattccaggctattacacagaagctggtttaattatcaagcaggcacgtgaaatgggaattgaacagcctatcatcggggctgacggctttggagatgaaaaactgattgaaacagccggcgccagcaatgtgaaaaacgtatactatacaggtcacttctcaaccaaagctccagcaacggataaggttgagccatttgtagcagcttttgagaagaaatatggcaagcagccatcttcatttaacgctttggcttatgattctgtttatatgattaaacaagcaattgaagacgaaggaaaagcaacaccagaggcaatcaacaaaggcttagcgaacttgaaagatttcgagggtgttacaggaaaaatcacaatggacaaagaacacaatccagtaaaatcagcggttgttcttggtctaacagatggaaaagaaacttctgctgaaaccgtaaatccttaattactcggaaaaagcaggcaagggggtgtgccaatggtatttggcacactcccttttaagaattagggctatgaatcgtccaaactatttttgaaaagtgatgtgataaagatggaagtatttattcagcaaatcgtcaatgggctttttctgggtagtgtttatgcattaatggcattgggctacaccatggtttatggaattattaaattgatcaactttgcccatggagagatttacatgatcggctcatttattggctactttctgatcaatcaatttaatatgggctttttcccagctttggttttatcaatggcagggagtgcaattttaggtgtcctgattgaattcttagcataccgaccgttaagaaattcaacacgaatcgcggctttgattacagcgatcggtgtttcgtatctattacagaacacaatgatttattttttcagttcaacgacaagaccgtttccgcaggtaattaaaatgcaggtctttaatattggcttcttgagggttacaaatattcagttattgatattaggattgtcattattcttgatgatcgcgttaaacctgattgttcagaaaactaagatgggtaaagcaatgcgtgctgtaagtgtcgatacggatgcggcgcagttgatggggattgatgtgaatcggaccatctcatttacctttgctttgggatcagcgctagctgcagcaggcggaatgatgatcggtctgtattacaactcgattgatccgatgatgggctacatacctggtcttaaatcctttatcgccgcagttttaggcggaatcggaattattcccggagcggctatcggcggatttgtcattggtttgatcgaaacgattacgacagcattaggtttttctgatttcaaagatgcggtggtttatgccgtattgattttgattttattggttcgtcctgccggtattttaggcaaacatgtgaaagagaaagtgtaggtgagtcaaatgaaaaagaatttgaaatataatttgatttggctagccttgatcgtgcttggatatgcagtattgtacattgcttattcagctgggatggtcaatctgtttttagataatattttggtacaaatagggatcaatgtaattttggcggtaggtctgaatttgattattggattttccggtcagttttcactaggacatgctggttttatggcgatcggtgcttatgcggcggctcttatttcgatgaataccccaacttatggtgggtttttcttagggatggcagtcggtgttcttatagcaggaatcgtcgctgtaggagtgggtattccaaccctgcgtttaagtggcgactatttagctattgccacgctgggtgtagcagagatcattcgtattctcttaatcaattttaaggagatcaccaacgggccttctggtttgtttggaattgagccttttgtcgattggcaaatggtttatggatttatggcgattactacattatttatcgttaactatattcgttcaggtgctggtcgtgcgacgatggcgattcgtgaagatgagatcgctgctgaggcgatgggcgttaatacaacaaagtataaagtaatggcctttacctttggtgctatgaccgctagtattgctggttcactgtatgcaggatatttacaatcaatcgctccgaaagattttgcttttactaaatcagtcgatattttgattctggtcgtattgggcggaatcggcagtgtgacgggaacctttattgcggcaattcttttagggattatcaatatgtatcttcaggattttggaacattgcggatgatcatttacgcgttggcattgattatcttgatgatctttaaaccaggcgggttactaggcacaaaagagctatctgtgaagaaaattctaactaagtttaaaaaaggagatgaccaaaatgcctctgttggaaattaaagatttaaccaaaaactttggcggtttggcggcggtctccaatgtcaatatcgcattagaagagaatcaactggtgggcttgattggtccgaatggtgcagggaaaacaacgttatttaatctaatcactggtgtttatgatccaagcgaaggggatgtgttactggaggtcgatgggaagagtcatcgattgaatgggcaaaaaccttatgcgattgctgatttaggtctgagtcggacctttcaaaatattcgtttgtttaaagatctgactgttttggataatgtcttgattgctatgaacagcaaaaataaagaaggctttttctctagtgtgctacgcttaccgaccttctataataaagaagaaaaattaaaagaagaagcgttgaaattattaacgatttttgatttgcaggataaagcagagaatctagcacgtaacttgccatatggtgagcagcgtcgtttagagattgtccgagcgcttgcgactaaaccaaaaattcttttcttagatgagccggcagccggaatgaatccgcaagaaactgcagcacttaccttattgattcgcaagatccaaaaggattttcaaatcacaatcctgttaatcgaacatgatatgagtctagtcatggatgtttgtgagcgaatctatgtgttagaatacggtcgtattttagctgaaggtaaaccagaagaaatcaaaaataatccagaagttatcaaagcctatcttggaggtgagctataatgctgaaaattgaaaatctttcggtgcattacggcatgatccaagcggtacgtgatgttagttttgaagtcaatcaaggtgaaattgtttcgttgatcggggcaaatggagcaggaaagacaacgattttacggacgatttctggattgaatcagccatctaaagggacgattacgtttgaaggcgcaccgattcaaaagaaagcgcctagaaaaattgtggctcaagggatatcgcaagtgcctgaaggacggcatgttttcccaggattgacggtcttggaaaacttagaaatgggtgcttatttgcgcaaggatggcgaaattccacaggattatgaacacgtctatgaaaaattcccgattttgaaggagcgattaaatcaagacgcttcaacattatctggcggggaacaacaaatgttagcgatgggccgagcgttaatgtctaaaccacgtctattgcttttagatgagccttcaatggggttagcaccaatttttattcaagaaatttttaatatcattcaagagattcaaaaacaaggaacgaccgttttattgattgaacaaaatgcaaaaatggctctatccattgccgaccgcggttacgtgctggagactggaaaagtggtcttgtcaggaactggtcaagaattgctagaaagtgaagaagtgaagaaagcttatctaggagggtaaaacatgagtgtaaaagattttatgacaaaagacttagtgacggttacaccgaaaaccaaaatttttgatgccgttgatttgatgaaaaaatatgatatccatcgcttaccggttattgataacgataaattggtcggattgattacagaaggaacaattcaagaagccttaccttcaaaggcaacgagcttgagcgttcatgaagtaaattatctattgaataaaacggttgtggcggatgtaatgatcaaggatgttaaaaccgtggctcctgacgcggaattagaagatggtatctatttgatgcgtcaaaatagaatcaacgtattgccagtattagacgatgagaagttggtcgggatcatcaccaataatgatatttttgatgccttcctaaagcttaccggttatcacgaaggcggtacacatgttcaactgaaaatccttgaggataaaaaaggggtattagctagagtcgcgaaaattttagcggacaatgacttcagtattctaacagtcattgtagatcatcaagcaaccgcaacaattgtcgaaattcaattagccagcaaagagacagaaaaaatcaaacaacttctcactgataatggttacgaagtattgcgggcagcgatcactcaaccataactttaaggacaactgaccactcagttgtccttttctttcgtagtatgataaactatttaagacggagggaaagatatgtctaaaaagaacaaagatatccaagttcaggttaaagaagaagaacgtctaattgatggagaaaagcaaaccgtgacacaattagtgatcggaaagaaaacgatcggcgaaattattcctgaaaataaaagtttccaagcctataacgacgggcatttactgggaagcttcaagacattagatgatggaattgaagccctgatacgcaactggaatttacatgaataatttttgaaaaagtacttgctttttttttgaagattaggtattataactgagtcgggtttttaaataataaaaaaacctagctggaggagtagcgaagtggctaaacgcgacggactgtaaatccgttccttagggttcagtggttcgaatccactctcctccaccattggggtatagccaagcggtaaggcaagggactttgactccctcatgcgttggttcgaatccagctaccccagtagtcaagtgagttgcaggtgcagctcactttttttattttatataacaaaatatcaaaagaaccagtggaatgaacactggttcttttagtgtcaatgattgatggtatttcgacggattttttgaagtccccaaaagcacactagactgagcagaaagattaaaaagagtgcaaaggacaatgtggcataaggaaatagcgaagaattagcaattgataaaaatggattaataagtatttgtcgaatcgcttcaggaacatgcggctgcatatctgtgagtgcctgagatatttctgacagatcgctatgtgcaggtaggatgctcgtataggtaccgagtgctttattgccgatggcaaggtagcctatcgcaatatttcctaaactgaatccaccaacaactaagtttccaaaggtaagtaatccgatggcaagattccccaacgcgatgactcctaaagcaaggtttccggcagagaataatcctaatgttaagataccggctgaaaaacatcctagcgataatagaccgatggaaatgatcccccttgaaaaaattcctaatgacaacaagcctgaagagaaaaagccaatactgacaattccatgtgcagtcggaatcaattgctttttatgccgtagcgtactaatcgcaaattggcgattgtgccacagcagctctgaaagatttggaatgacgatgtgcagtaaaggcagtgtaaacaaaagagtcgttgatcgatattcaaaatatagttctggctctcgttcgtttaataaattgtctaacgagagatctaataattgtgcaatacgttttaaagtatcgatatcagggtacccagccccgcgttcccatttggaaaccgttcgatcagatacatataaaatattcgctaattgtttttgcgtaagctcatttcgttgtcgatagtttcttaattgtttccctaaaaaatttcccatttgatttcctctttctgattgataagttaagcatagcggattgacagagaaaaaggtataaaatctgttgaaaaagtgattctactttgcgtagagtcttgataaatcaagctttctaaatcagcctgttaattttgcaaagagctctcacttgatgggaattacgatatacgctaccatttatagtagaaagagagcagtagtgatttatattttgaatctgaagggagtctgtacttatgaataaagttgaagaaatgaaagaaatgctgacagatacggtaacaaaaatttacagtacaatcaaagagagttcaatagaagtaacaaaggaaaaaggacaagttccacgcgtgcgtacgattcgtccgactcgccacacgattaaatggaaagccaaaaatcattaataatcagagaaggagctgaccaaaaagtcttttagactttcggatcagctccttcttatttcttgaccacttatgagtcgtactctttttttaatggtctatttcaatgcctaaaatagtcaggtgtccattgccgactaatttgattaccagcttcgaaaggctgtcagcgctcatggtcgtatcgctagtaatccaccagtgcagggtaccaacgaaaatcgaggtcatgtattcaatgataaaatctaaaggaacttcaatgtcattctccgtaatttttaggcgtttgaagacatgtgagtatttttcattgagaatctctgcgactttttttcgcagaatttcattccctgaggcatccataattgttaagaagaatttccggtttgcttgaatttgttcatatatattttttaataccatttcaattttccgaaccttcaaacgattgccttgaacaatctgatctgggtcaagaacagccgcaaaagcatcgattgcttgtttaaagatttgatcatagaggtcttgcttgtccttaaagtgggaataaaaggttgcacgattgatcatcgcttcgtccgcgatctcttgaatggtgatattatcatagccttttgcttctactaaatgaataaaagcctccataatcattttattggttcgtttaacccgaaggtcgattttttttgccatagtaaaatcctttcatttttacaacatatctagagatattgttgcttatcgcacggatgaaacggttttgagtattgcataacgttcgaaatgtttttagaatatacgtgagtagtataacaaacactttgtaagttaatcaacatgtgttgttaaaaatggaaggtaggaataatcatgacattacgagcggggattgatgttggctctacaaccgtcaagttggtcattttaaatgaacaaaacgaaagcatattttcgaagtatgaacgtcacttttccgatgtgaaaactgccacagaacgtgtgttgcgggaagctgaatcaatgattgacactcaaggaatgacgatgagcattacagggtccggcgggatgggtctagcagatgttttagagattccatttgtccaagaggtaatcgcgtgtactcgtactgttgaggaagttattcctgaaacagacgtcgccattgagttaggtggagaagacgctaaaatcacgttttttgaaggcgcattggaacaacgcatgaatgggagttgcgctggtggtacgggagcattcattgaccaaatggctgttttattgaagacagatgcgaatggagtcaatgaactggctaaaaattataaaacaatttatccgattgcttcacgctgtggggtttttgctaaaacggatgtacagccgcttattaatgaaggagcagcaaaagaagatattgcagcgagtattttccaagcggtcgtgaatcaaacgattgctggtttagcagctggtcgtaaaataaaaggaaacatcgcttttctaggtggaccgctattcttcatgtctgaattgcgtcaacgatttatcgaaacgttaaatatcgcgccggaaaatgtcatctttccagaaaatcctcaactctttgtagcgatgggggcggctttttattcagaggaagcagaagtaaccacattgaaagacttgctgcatcgtctaacaacagccgaagagggacatctgtctccgtcagacacattagagccattatttgagggagaagcagaattagccgactttcgaatgcgtcacggacaagcacaagcacaagaaaagagcttgtctgatcatgaaggggtggcctttttagggattgatgctggatcaacaacgacaaaagtggctttgattgatgacagcggcaatttgatgtattcattttacgggaataaccaagggcaacccttggaaacaacgatgaccgtgctgaaggacttgtatagaaaattgcctgagaatgtctttatcgggaaagcggcagtaaccggctacggcgagcaattgatcaaaaatgcgttgaaggtcgatattggtgaagtggaaactatggcccattacaaggctgctaatcattttcaaccaggtgttgatttcatcttggacattggcggacaggacatgaaggcgatgacgatcaaggatggcgcgttgtcctctattcaattaaatgaagcttgttcatctggctgcggctcatttattgagacatttgccaaatcattgaattacaatgttgaagattttgcgaaggcagcattgaaatcaaaggctcctgttgatctaggatcacgttgtaccgtatttatgaactctaaagtaaagcaggtccaaaaagaaggcgcctctgtcggtgatatttctgcgggcttgtcttattccgttattaaaaatgcgatttacaaagtaatcaaggttcgtcgtccagaagagcttggcgaaaaaattgtctgtcagggtggaaccttctacaatgaagcagtcctgcgtgcttttgaaatggtcacggggcgtgaggttgttcgtccgtcgatcgctggcttaatgggagcctttggtgcggctttgatcgctttagaaaattacgaagtcggagaaaaaactgaaactctctctttagcagaaatcgacaccttcaccgctgaaaaagaatttactcactgtggtttatgtgaaaataattgcatgcagacagtcacgttgttctcagacggacgtcagtttattactggaaatcgttgtgaacgtggggcacgaatcaagattaagcgagaagataagaaagtcaatcttgtcgattacaaatatcgccgtttattcaaatatcgtccgctccggaaaaaagaagccattcgcggtgaaatcggtattccccgcgtcttgaacatgtacgaaaattatcccttgtggcatactttcttcagtgatttaggcttccgagtgaaattatcgccgcgttcaaacaaagaattatatgaacaaggaatggaaactattccaagtgatacggcctgctacccagcgaaaatcgctcacggacacattcaagctttgattgatagtggtgtgccgatgattttctacccaggtgtggtatttgagcgagaagaatcaaaggaagcggataatcattttaattgtccgatcgtccaaagctatcctgatgttatccgcaacaatgtcgatgatattcgtgaagggaaagtggattatcgcaacccgtacttgaacttagccaatgaagcctctgtcgctaaagttttaggacggtgcttcaaagatctaggtattacacaagaagaaatcaatagcgctttgcatcatgcttatgaagaattagaagtattcaaagaagacattcgtcaaaaaggcgaagagactttgctgatgctcaatcaaaaaggggaacgaggcgtagttctttctggacgtccgtatcatttggaccctgagatcaatcatgggattgcagaagtgatcacccaagaaggcttccatgtgttgacggaagatagtgtgtcccacttgagtgatgtcggcaaccttcgtgttgttaatcagtgggtgtatcattctcgtttatatgcagccgcacgagtggtagcaaaatcgaaaaatctagagctggtacaattgaattcatttggctgcggtcttgacgcagtaaccacggatcaagtcgaagaaatcatggatcagtatggcaagatttataccgtcctgaaaattgacgaaggttcgaacttaggagctatcagaattcgtttgcgttcattaaaggcagcagtcaatgaacgagataaatcgaatttcgaaccaacgaaacgctttgaagaaccagaaaaaattgtcttcacgaaagaaatgcgtaagaaacatacactattattaccgatgcttagcccaatccatcaatcaggcttgtttgatattgctttagaagcatcaggatacaatgtagtgtgtttaccagcaatggatcgtgaggccatcaatgtgggcctgaaatttgttaacaatgattcttgctacccagcaatcatctcgattggtcaattagttgaagccttacaaagcggcaaatatgatttaaataatacaagtgtgatgatgagtcaaaccggaggcggttgtcgggcgacgaactacattccattactgcgtaaagccttgaacgatgctggcttcccgcaggttccagttgtttccgtctcacttggaaataaaggggtagaaagcaaccctggctttaaatatacactgccgatgctgaagcgtatcgtcgtagcgattctttatggcgatttgtttgaacgcgtggtatatcgcacacgtccatatgaattagaaaaagggcagattgatgctttgcatgaagaatggttgaagaaagtcgaaggaaatgttcgaaatggctcattgacgcagttcaatcgcaacatgaaaaaaatcatcaaggattttgatacagttccaatttcaaatgaagttaagccgaaggtcggtgtcgtcggtgaaatattggtgaaatactcaccaacagccaataatgacattgttcgcttgttagaagcagaaggcgctgaagcggttgttccggatttgatcggctttatgaactattctttatataatcagatttggaaatacgacaatatggggatgccgaagaaaaataaaaatctggccgaaatggcgatcaaattgattgaagttgtagaaaaaccaatggataaagccttacgtgcctctgagcgctttaccgggattcattctatctaccaattggctgaagatgccagcaaaattctttcaatcggtaatcacacaggtgaaggctggttcttgactggtgaaatgattgatctgttgaaaactggcgtaaacaatattgtctgtatgcagccatttggttgtttacccaatcatgtagttggtaaaggtgtcattaaagaattgcgccaccaataccctaaatcaaatattgctgcgatcgattatgatcctggtgtttcgattgtaaaccaattaaatcggattcgtttgatgatggcaacggccaataaacaattaaaggaagaagttaaaagttgattgaaagagtagaccaattaaaaaaggtctactctttttgtaatttttactcgtacgttagcacgaataaaaaatcgtatacgcacgaaataaagacaattttttgcggtcaggaaagaagcgaatcctaaccaatgaactagctgttagtcgttagttctattggtaagaacagattgattcaaactggcagacatttaatgaaggctattttaactaccggagattcaaaaaaatactttaaaatgatccgtaaaaaacagaaatcaaacatgagataaaaaaggattattgttgtacattaggtatataccagttataataagaatagataatttgaacggggtgatggccatggcaaatcaagtgccagtttatattcaaatacatgatcagctaaagcatgaaattgaaaacggtgtatggaaggtcggtgcacgtctaccttctgaacgggaattgtctttgaggtttggcgtaagtcgaatgactctacgtcaggcaatccaaacactttctgatgaaggaatactggaacggaaaattggttcaggaacttatgtagccagtcgtaaagttcaggaaaagatgactggaacgacaagttttaccgatattatggaatcgcagggaaaaattccctccagcaaaacgatctccttttttcactcacgggcaagctctagcgaagcggaaaaattaggtttagaaaaaggcgaacaagtgttacgaatggaacggattcgttacgcggatgacctgccaatctgttttgaagtggcgagtatccccgctaaattaattgaaggttttagcaaagaagaaatcacggaatcgttctatcatagtttgcaagaaaaaggttttgaaatcggtcgtgccaatcagacggtatcagcaacattagcttcagaacaaatcgctgaatatttggcagtaaaacgtggtgacgcgatcttgcgtttacgtcaaatttcatatctagcggatggggaaccatttgaatatgtccgcacgcaatatgttggcagtcgctttgagttttatttagaaaaataatccaagcggctatgcctcttggattatttgctcatgataagtgacttcgccagtagtaaagctcacttgaccattcagcaaatcagtaacctgagcttcgaaatcagcaacttgattctcatctaccatacaggtgacaacaactcgatcggtgaattgagtatctttgacagcaagattctcgctggcaataaaattctccatctttccccaattcgagtagtcaagctggacgaagacttcttgctgcagtctgccctcaacaatccctgtatggacaattgcttgagcaaccgagccagaataagcacggatcaatccgccagcgccaagctttgttccgccaaaataacgagtgacaacagcacagacattgattagatcattttttttcattacctctagcattggaacaccggcagtcccgctgggttctccatcgtctgaagagcgctgaatctcatgatgatctcctaggacaaaagcgctgcaattatgatttgccttccaatgttctttttttatttgttgaatgaatgcctttgcttcttcttcagtttcaatgcgttttaagaagcaaataaatctcgattttttaatctcgacttcgtgttggttgtcttcttttatggttcgatatttttgcagcatgtttttgcctcactttagttttctctattctagtatagaagaaaagcgggagaggtttcaactaaaggctgttttgtctgtatgattttttgtttgaaggtgagggatgagcatgacacgtgcaaaaaaatatgacagcattacgcattatttaaaaaataataatggctcacaagtcacgttgacctttacacaatttgacgagctgttgtttcctcgcagcggattacctcataccgcgcgccaagacccagattggtgggcgaatgattatcgccatccggaaaaaggtgcatatggttggttgaatgcgaattatgaagtagtacaggtaaatctcggcaaggaatacgtggtttttaataaattagtaaaatcaagttggttaatttagctttttgtgaaaaacagtcagagaaaagtgcggcaagtcattgctgcgctttttttgtttttctaagaccaaaagatgtttcaaaatcaaaaaaacttagagtcgtttgcgtatctttctgaaaaagagggggagacaaatggaaataacaggtcagcgtttattattagaggagtggcgtacattttaccctaagattgatctgactcaagctgaaaaaattcctgcaatggtgcagattgataagaactgggtgtgtcagcgatgtggtgaagtctctcaagaaaaggtacccgcaggatttttttattgtccgtcttgcttggccttgggacgtgtggatagtaatagttcactgtatttctttcctattaaaaaggccgttccgaaaaaagtggttctcacgtggtcgggaaaactttcaactgcgcaacagaaaattgctgatggcttacttgaggatcaacttaaaaagcgttcctttctactttgggcagtcactggtgcggggaaaacagagattctttttccgcttttaaagagtcttttggagaaaggcaagaaaattgctgtgacttctccgcgggtagatgtttgcaatgaggtctttcttcgttttcgccaagcctttcctgatgaaaaaatcagtctttttcacggacaggaacgaaaagatgcaggtgatcagtttgtcgtgtgcaccgttcaccagcttttacgttaccacgaattttttgatttagtgattgttgatgaagtcgatgcctttccttacgctgaggaccctttgctgcatcgagcagtggacatcgcgcagaaaagagaaggaaaacgtgtatatttaagtgcgacaccggataaggtgttaaaaaagacagttgaccgggtttattatttgccagcacgttatcatcgccgcaagctgcccgttccgcaagtattgttttcttggtgtttagaaaaacatttacttgcaggacagttgccaaagaaggttttagctaaaataacggatttactagagaaaaataatgttttatttttttgtcccaacatctccttattagcaaaaatagcagcgtttatccaaggtgtatactcagatattcgattgacgacggttttttcacaggatcaggagcgtctaattaaggtcgaaaacatgcgtgcaggaaagtatcaattacttttaacaacgaccattctagaacgtggagtaacctttgagagggtatcggtcatcgtattgcaggcttctcatcgggtctttaaaaaatccgcactggtgcagattgctggtcgagcggatcgtaaaggagagtattctcaggcagaggtgatttttgttaccagtgaacgaaccacagcaatcaaatcagcaattagggaaattaaaaagaacaatcagcaagcgttgaaagaaggattgatcaatgcgctgtagctgttgtcaaaaagagttagtgagaaatctcaccctacgagaattgttccactctgcaaatttgagatgttatcattgtgagaaattatttacaaaaatcgatcaagccacttcttgccctggttgtggaagagcagattcatcaaaactctgttcggattgtcgattatggcatcaagagcttggatttgtcatgaaaaataggagtctctttcattatgatgagggatttcgcaaatggatcgaagcctataaatttactggagattaccgattgcgaggggcgtttgtcaatgagcttgcacaaattttacaaaactatcgtgactatttaatctgtccgctgcctctttcgaaggaacgatttgaacaaagagggtttaatcaagttcgcggctgtttagaactgacgaaaatgcccttgaaagatttgttgcgacgcaaggagttaactccacagtcagaaaaatcacgtaaagctcgcttggaaatggagcagccatttgagttaagggtagcaaatggaaaaattagaaatcaaaaagttttattagttgatgatgtttatacaacggggcgaaccctttttcatggtgccgaactgctttataaaaatggtgtggaagcggtagaaagcttgacttttgctcgttaaaatgcatcatttaggattatgaaattgatagcgatttactttgcaaaaggattagatttcgatataatagagttaagaagaagaggtaagagtggtccttccttctcttcagttggcaagacgaaaggggcaatacgtatgttcaaatataatgttcgtggggaaaacatcgaagttactgaggctatccgcaattacgttgaaaagaaagtaggaaagttagaacgctacttcactgatgttccggacgcaactgcttatgtcaatttgaaagtatacacagaaaaaacggcaaaagttgaagtaacgattccattaccttacttagttcttcgggcggaagaaacttcaccagatttatatgcaagtattgatttggttgtggataaattagaacgtcagattcgcaaatttaaaacaaaaattaatcgcaaagctcgtgaaacgggcatgcctgagcgtgaagtagaagtgttagtgaacgcagaagattcagaagaatctgaattagaaatcgttcgtacaaaacgcttatcattgaaaccaatgggtagcgaagaagctgttttacaaatgaacatgcttggacacaacttctttatttttgaagatgctgaaacaaatggtacaagcattgtttaccgtcgtaaagatggcaaatacggcttaattgaaacagattaataagcgtttatcgccttccagctgatgctggaaggttttttattttcaataaaaataaagttttgggagatagaactgtttattgtaagaattgttccttattcgacttggtcttaaagaaaatcacaaaaaaagattaatcattatataagacgcgctttattcgccgcgagaagtttcttttctcaaggactaatgataaaatatactagcgggtttctatcaaaaaatagaaaatgaaaagaaataaaggagtaaggtaaacgaatggcaaactttctgagacgaatgattgaaaatgataaaaaagaattaaaacgattgagcgggattgctgacaaggtcgaagaatattctagcgacatggaaaaattgtctgatggacaattacgtggcaaaaccgaagaatttagaggacgttatcaagcgggggaaacgctagatgacttattgccagaagcttttgcggtggtccgtgaagcagctaagcgtgttctaggcttgtatccataccacgttcagttaatgggcgggatcgttttacatgatgggaatattcctgaaatgaaaaccggtgaagggaaaacgttgacagcaacgatgccggtttatttgaatgccttgactggagaaggagtccacgtcgtaactgttaatgaatatctagctacacgtgactccacagaaatgggtgaattgtataacttcttaggtttaagcgttggtttaaatatcaattcaaaaacttctgaagaaaaacgtgaagcgtacaattgcgacatcacctacagtacaaataatgaactaggatttgactatctgcgtgacaacatggtagtttaccaaagccaaatggttcaacgtccattaaattatgcaattgtcgatgaagtagactcaatcctgattgatgaagcgcggacaccgttgattatctctggtgcggctgaaaaatcgacagctctttatacacgaactgataattttgtgaagcgtttgaaagaggatgaagatttcaaaatcgatatccaatcgaaaacgatcgggctgactgaacaagggattgaaaaagcagaagaaaactttggtttagaaaacttatacgatttagacaatactgcgttgacccatcacttagatcaagcattgcgcgcaaacttcattatgattcgcgatattgattacgttgtgcaagaaggcaaggttttaattgttgaccaatttactgggcgtatcatggatggacgtcgttattctgacggtctgcatcaagcaattgaagcaaaagaagcggttgagatcgaagacgaaacgaaaacgatggcgactatcaccttccagaactatttccgtatgtataaaaaattagccggaatgactggtactgctaaaacggaagaagaagaattccgcgaaatttataatattgaagttattcaaattccaacaaaccgtccgattatccgggaagaccatgcagatttgttgtatccaactttggaaagcaagttccatgcagtggtacaggacattaaagaacgtcatcgcaaaggccagccgatcctagttggtacagttgctgttgaaacgtctgagctgctttcaaatatgctggatcgtgaaaaggtgcctcatgaagtcttgaacgcgaaaaatcactttaaagaagcagaaattatcatgaacgccggacaaaaaggctcggtaacgatcgctaccaatatggccggtcgaggaactgatatcaagttaggcctaggggtcgttgaattaggcggtctagctgtaattggtaccgaacgtcatgaatctcgtcgtatcgataatcagcttcgtggacgttcaggtcgtcaaggagatccaggggtttcacaattctacctttcattggaagatgatttgatgaaacgttttggttctgaacggatcaaagccttcttggatcgtatgaaggtagaagacgaagatgccgtgattcaaagtaaaatgctgactcgccaagtagaatctgctcaaaaacgagtagaaggaaataactatgacacgcgtaaaaatgtcttgcaatacgatgatgtgatgcgggagcagcgggaagtcatttacaaacaacgtcaagatgttattatgggcgaaaaggatttgtctccgcaattgttgaacatggtgcgtcggacaatttctcgtgtggttgacagccatactcaattagataaagataattggaatcttgaagctttagcggattttgctggagcaacattggttcatgaggattctgtttcaaaggctgattttgaaggcaaaacaccagaagaaatgaaagattatctatatggtcgcgccaaagaagtatttgatacaaaagcgtcacaattgcaaagtccagaacaattgttggaatttgaaaaagtggtcatcttgcgtgtggtggatacgaaatggacagatcatattgatgcgatggatcaattgcgtcaatcagtcggcttacgggcttatggacaaaataatccgttggtagaataccaaacagaaggctacaagatgtttgaggatatggttggagccatcgagtttgaagtaacacgtctattcatgaaagcggagattcgtcaaaatgttcaacgagagcaagttgctcaaaatcaacaagaacatcctgtagaagcagatggagatccgaagaatttgacccatactaagcaaaaaccggttcatgtggaaaaggttggtcggaatgatccatgtccatgcggcagtggtaaaaaatataaaaattgccacggtaagggacaataattttctacgataagtaaggaaccttttgaacgggacatagccgctatgtctcgttctttgcgagttcgtgacgctgttctatttctacaagttgtcacagaagcttaaaaaatgtatataataagagttagttttaaatgtttggttttacggattgttttatccgcaagaaagaaggaatagatttggaaaatgcagaaatacgtaattttttagatacgatgcaagagcaagtcgcaagcttcagggggtctctttgacctagagcagttagaagaggatatcgccgaagcagaaaatcaaatgtctgcaccaggattttgggatgactcggaaaaagctcaagctttaattaatcgcaacaacgcagcgaaagaaacatatgatcaatttcaagcgattgctaacgaaacagatgagttaaatctgatgtgggaaatgcaacaagaagagtttgatagcgatttgcaaaaagagctggaagaacgcttagtacaattgcaggaaaagatttctggctttgagttatcgctgttacttgatgctccctatgataaaaacaatgcaattgttgaattgcatccaggtgctggtggaacagaatcacaggattggggatcaatgcttttacgaatgtatacgcgctggtcagagcagcacggattttcagttgagacgattgattatcaatcaggtgatgaagcaggaatcaagagtgttacactgatgattaaagggacgaatgcgtatggttatttaaaatcagaaaaaggtgtccaccgattagtgcgaatctcgccgtttgattctgcgagtcgccgtcatacttcattttgttccgttgaggtcatgcctgaattagatgaaaatattgaagttgagattaatccagatgatttgaaggtcgacgtttatcgggcaagcggagcaggtggtcagcatatcaataaaacctcatcagctgtacggattacgcatttgcctacgggaacggttgttgctagtcaagcacagcgttcgcaatttcataatcgcgagacagccatgcaaatgttaaaggcgaaactctatcagttagaaattgagaagaaagagcaagaagctgctgccttgcgaggggaacaaaaggaaatcggttggggctcacaaattcgctcttacgtttttcatccatactctatggtaaaggatcaccgtaccgaatatgagacgggaaatgtccaagcagtaatggatggcgacttggatcctttcatcgatgcttatctgaaatggcgtctggcacaagagtcctaagtttaaaatgaaatcaaattgtaaagtaatgaaagcctgttgcaatgttggcatgctataatagcaaagaatttaagaggatttggagagataaagcatgattgaaatgcaggatgtaacaaaaaaatatcctaataagacaacagctgtgcgtgggatttcggtccgtatcgatcaaggtgagttcgtctatgtcgttggtccctctggtagcggaaaatctacctttattaagttgatgtatcgtgaagaaaaagccacatccgggaaagtattagatgttgcccgtcatgatttattaaagatcaagaataaagaagtgccttatttacgtcgtgatgtcggcgttgtgttccaggacttcaaattattgccccgaaaaactgtttatgaaaatgttgcttacgctatgcaagtaatcggtcgtaaaccacgggatatcaaaaaacgtgttatggaggttttagaccttgttggtttgaaacacaaagtccgcgtattcccaagtgaattatctggaggagaacagcaacgggtctcgattgcacgtgcgattgtaaatacaccaaaagtcctgattgctgatgaaccaactggtaatttggacccagatacttcttgggaaatcatgcatttattagaacgaatcaataatcaaggtacaacgatcgttatggcgactcataacaaaacgatcgtagacaccatgcgccatcgtttaatcgcgattgaaaatggcttgatcgttcgagatgaagcggaaggagaatacgagtttgatgattagaaatttcttccgacacctgttggaaagtatcaagagtgtgaagcgtaatggctggatgactctggcatcagtcagtgcggtaacgatcacgttaacaatggcgggaattttcctggctgtgattatgaatgcaaccaagttagctcaagatgttgagggcaacgttgaagtgacagtctttgttgatatcggtacaaaagataaagaattaaaagaattgaagtctgaattacaggatatcaatcatgtggacaaagtgactttttctagcaaacaagatcaattgaagaagttgcaaaaacaaatgggcgatgcatgggaccttttcgaaggcgacagtaatccactctatgatgtatatgtagtaaaggcgaccgatgcacaatatattcgtccggtgactcgagaagccagtcaattaagtaatgtctttcgtgcaaattacggcggaaattcagctgaccgaatcatccagatggcaaaagttgtccggacttggggcttagcagccgctgccttattagttttcgtagcaattttcttgatttcgaatacgattcggatcacgatcatttcacgtaaaacggagattcaaatcatgcgtctggtaggtgcgaaaaatggttatattcgttggccattcttcctcgaaggcggatggattggattgattggttccattgtgccaatcttgatcttaacttatggctactcgcaagtttatggcttagctgccccttatctattgcaatcaaacttagaattgctgcgtccaaaccaaatcgtatggatattagatatcacgatggcggtcggcggctacttgattggttcattaggatcagttatctcgatgcgtcgtttcttaaaaatctaacaaatcaaagcttcttcgaaaaatttcgaaggagcttattttttgccagaattagtaaagaattctatcccttgatttttttagtaaaagctcctagaataaatatcaattaaataaaacgctaccgagcaagggagccaatttcgttaggtcattgaagaaattggacttccttgttttgcgtgttcaacttcttccagtttaatcatgtatgaattgaagattaaacccaattattaatattaaatgtttaaacggtttcgttgaactgtatgcgtagcgcctatttagattattaatcgaggaggaatattgattatggcatgggtatcattgattgtggcaggagtttttgaaatgttttgggcgacgatgatgaaattgagtgaaggttttagtaaaatgaattattcgcttttgacgataattggcatgatagccagtttttattttttgtcgaagtcgttacattcgttaccgatgagtttagcttatcctatttggacaggaattggcgctgtcggctctattttaattggggttcttttatttaaagatcatttgtcgcttttaactagtttctttgttgtacttttggtagcaggaattattggaatcaagattactagcggacattaagccaaaattaggttaaactatttttagcaaaagctcaggaggatcttatgattaaaagaacggatgaactaacaccacaagaattattgacaatattgcaggctcgtacggcggtttttgttgtagagcaggagtgtccttatcaagaagtcgatgaagctgatcggtcggcgttacatgtgtggatcgaagaaaatggcagattgcaggcctatgcgcgaattctagccgaagaagaaacgatccattttgggcgtgtactagtcgttaaagaatatcgtggacagcaattaggacgaacaatcgtatcgaaaacgctaaaagaaattgagactcgctatccaaagcgtccggtggtcatttcggcacaggcccacttagttgatttttatcactcatttgggtttgaaaaaaactctggaatctatttagaggatgaaatccctcacattgagatgattttgagaaatgaaaaaaatcactaaggtccattgtttacaatcaacattatctcggctatcctttagtagaaggagtgtgggagaatgtcatttgtgacagggcacttgggattacttttcctaattatcaatactattttatcatttatcattgtttttcgagaacgtaaggatacggttaatacgtgggcatggctattagttttgacttttatccccattctcggctttattttatacgttttttttggaaagggaatctccaaggaacggatctttgatttaaagatgcagaccaaaatcgggatgaacgtagaggtccagcagcaacaaagagcactagcacgaggactttttccaaaaccgacaacaaaccaagtcgatccgaaacagttgatttatatgctgacgatgtttgagagttcgttgtataccaccaataatgaagtcattctatataccgatggacgtgagaagttcgatgctttaattaaggatattaatcgggcaaagtaccatattcatatggaatactatatttatcgcgcagacgacttgggtcttgaggttcgagaggcattagtagcggctgctttacgtggtgtaaaggtccgtttgctcttagatgcttggggctcaacacaagtaaatcgccggtttctctctccgctgatcgaagtcggtggagaggtcgattttttctttccgctgtttttaccgtatttgaacccacgaatgaattatcgcaatcatcgaaaaatcgtcgtaattgatggagagattgggtatacgggcggctttaacgttggcgatgaatatcttggcttagtcgaaaaatttggctattggcgggataatcatttacggattcacggccatgctgtgtacacattgcagaaccgatttttaatggattggaattctcagcagaaacacgagctggtctatcagcctgattattttcctgagattaaatcagaaggaaaattagcgttgcaaatggtgagtagcgggccagacagtgagcatgaacagattaaattgacttatttaaaaatgatcaatttagcaaaaaaagaaattttgattcagacaccctattatatcccggacgcaccaattcatgaggctctaaagctggcattattatcaggtgtaaaggtacggatgcaaattccgaataagccggatcatattttagtttattgggcaacttactcctttgcggctgagttactggaatatggcgcaattatcgaaacctatgaaaatggttttattcatgcgaagacgatgatcatcgacggtggtattgcttcggtagggtcagccaatattgatgttcgttcattcaagttggattttgaagtaaacacgattgtttatgatgcagaatttgctgaggaattacgagacgccttttataaagattcgatgaaatctgaacttcttacccaggaaaaatatgatcagcgcggaatcgttattaagttcaaagaaggaattgcacgtctgatttcaccacttctgtaaaaatcatttgcgctttcatgggttgatagtataaaatgaactagcttgtttagtaagactatcgtttagaaaatgattacgttaaaatgaataaggatgccagttcaacttttcgcagtatactcagaagtataagctaattaaaatgaacaagtgaactcaaaaaatagtcgctagttgaatggtatacggcatgaaaataagtatcatttttcgttttttgaaaaatgattacgttaaaatgaataaggagatttttcatgaagaaatggttaattcctcttttaggtacgcttttacttttgtccggttgttcgaaatggatcgaccgcggcgaatcaattactgctgtcggttcatcggccttgcagcctttggttgaaacggtagctgaagaatatcaaagtaaaaatcccggcagatttatcaatgtccaaggcggaggaagcggtactggattgagtcaggttcaatcaggggcagttgagatcggaaattctgatttatttgcggaggaaaaaagtggcatcgatgcagataagttagttgatcataaagtagcagttgttgggatcacgcctattgttaacaaaggtgttggcgtaaccaatatttcgttagagaatctgcgtaaaatttttctcggtgaaatcacaaactggaaagagcttggcggaaaagatcaggaaatcgttattctaaaccgagcaagcggaagtgggacgcgctctactttcgaacaatgggtcttagatggaaaaacagcgatacgtgcgcaggaacaagactcaagcggaatggttcgccaaattgttgctgacacacctggtgctatcagttatacagctttttcatatgttacaaaagaggttcaaacactgaatattgacaatgttgaaccgacagatgagaatgtgacgactaatcattggaaaatttgggcttatgagcacatgtataccaaaggaaagccaacagaactagttgccgattttcttgattatatgctttcagatgaggttcaaggaaaagtcgtttcacagcttgggtatattccgatctctgaaatgaaagttgaacgtgattggcaaggtaatgtaataaaataagttgaaataccgtttcgaatgttttcgaggcggtgtttttttataatagatgcaataggagggatgaaagatgtactatccaattcaactgccttttttgttaaatgaagagtttacgcgcgtcatgagttatcatgaaaaagtagtgcctgaatgcaaggagtttgtcttgtgtttttggtcgatgtggtcgaaaacacaggatcaagttcgtgtgaagaacgtcatcatcgcagatggctgtattgatctgattgtggacttcgaccaaaagctgatttttttcacaggaaatcaacaaacagattttgattatgaaattgaggtaccggcacgcttttttggcgcacgcatgatgccaggggcttttcatcaattaactggtttatcagcagaagcggcaatggataccttcattttactacaggatatttttgatgattttgatcagaaacagttttttacaaatatgtttgagaatgcgcaagaaatttttcaaagctatttgataaaaaaatttaaagagctaaagccaaatgagtttactcagctttttccgcgattgtctcaagcaatcccacaaaccacaaaaaatttgtatgagctactttattttagtccgcgtcaatgccaacgtgcttttatgaaaaattttggattaacacctaaaatggttttaagcattctgcgttttcaaaaatgcttggagatactgacctcggagcaagcaaagccagcagatattttaaccgtcaccaattattatgaccaaccgcattttaacaaagattttaagcatcatttaggaatcacaccgctggaattggtggatcgatataaaaattgacgcatttttacaatacgtttcgacctgtccttgataaaattagcctataaattgaggaggcggttagaatgtacaaaaatattacaacgaatttaatggtggcaagtgtggatgcatcggtgaagttctatcaagagattttaggactagaagtggtggcttctgtcccagcgaaggatcagacattgcaatttgcaattatcgctaaagaagccatgacattgatgctgcaggaaaaagagaatttgagtgaagagtatccgatattagccgcggaaaaaatccaaccatccatcacattatatattacagttgaaaattttgaggagttctatacgactattaaaagtaactatccaatttatactgaacctcataaaaccttttatggagccaatgaatttgctattacagatccggatgggtatgtgttgacctttactgaatataaagaaggatgatcaaagatgaaaagtgatctacaagtgattccggggattggaaaaaatatggctcaacatttaataaacgcgggttatccgactgttgagtcattgaaaaagcaagatccggaggaaatctacctaaaggattgtgtgaatatgggggagaaggtcgatcgttgtgctttgtatgtttatcgtttagccgtacattatgcgaatcatgatggtgtactgccacaggataagcagaattggtgggattggaaggataactaaacaaaaagaaaaaatctcgtgagacatcacgatcaaactttgccagtctttggcttagcttgatcgtgtttttttgttttcaagcagttcagttgcggtgatgctctcatctggtttacactttctttacaaatgtcatggaagcgttacaggaggttaaaaagaaattgattttcaacaggtaaaatgattttgttggtttgtaaaaaaccgaatggattagtttgtaggaatcaggaggagtaggccttggaaaatgaagatgtaaaaaaagcgctgacgacaaaatcaaagcgcgcgagaatcgaacaacgaggacgttttgttagttttatttgtatcgcgttgatcgtgtttgtggttggagcgattttctattttgtagcaagcaaagggttatcaaccttttttgtagataagattaatgtttttgactttttatttggtacagtctggaatcctagtgcaacaggaccagatggcaagccgctagttggtgctttaccgatgatcttaggatcgtttatggttacctttttatcggctattgtagcaacgccttttgcaatcggggcggcggtcttcatgactgaaatttctccaaccaagggacagcgatttttacagccggtcattgagttacttgtagggattccttcggttgtatatgggtttattggtttaacagtgatcgtaccgtttattcgttcgatttttggcggcacgggatttgggatcttatctgggacatttgttttgttcgtcatgattttaccaactgtaactacgatgaccgtggatacgttaaaatcagtaccacgtcattatcgggaagcctcactggctcttggcggcacacgctggcaaacgatttacaaagttgtcttgcgtgcggcaataccaggaattttgacggcggtcgtttttggtatggctcgtgcctttggtgaagccttggccattcaaatggttatcgggaatgcggcattgatgccaacaagcctgaccactccagcatcaacattgacttcgattttgacaatgggaatcggaaatacgattatgggcacagtagaaaataatgttctgtggtcattggcactgatcctattattcatgtctttagttttcaatatcttgattcgctacattggaaagaagggggagatcagcaatggataaagcaaaacgtgcagataaaatcgcaacgggtattctatatgccgtctctggcctgattgtcgcaatcttagcttttctattactttatattttaattcgcggcttgccgcatgtttcgtgggagttcttgacctcgccttcgaaagcttatcaaaaaggcggcgggattggtattcaattatttaactcgatctacttattgctgataacgatgattattagtctacctatctcattaggtgcaggtatttacttatctgaatatgcgaagaaaaattgggttactaatcttattcgtacctcaatcgaaattctgagctcgctaccttcagtggttgtcggtttgtttggcttcttgatttttgttattcagtttggttacggcttttcaatcctttcaggtgcgttggctctaacattgtttaacctaccattattaacaagaaatatcgaggaatcactaagagcgattcattatactcaacgggaggcaggcttggctttaggcttgtcacgttgggaaactgttacaaaaattgtcgtaccggatgctttaccaggaattttaacaggggttattctaagctctggccgaatctttggcgaagcggcagccttaatctatacagcaggacaaagcgcaccagctttggattttaccaacttcaatccattaagcgtttcgagcccgttaagcattttccggcaagcagagaccttagcagtgcacatttggaagattaacactgaaggcacgatgcctgatggaacttctgtttcagcaggggcttcagcggtcttaatcttagcagttttattgtttaattttggagcacgggcaatcggtaaacgactgcatcgaaaaatgacttcagcttaaaatagttacattagtgtgaactaggatgtcagttctgcttttcgcaggaaatatcgaactaggagaaattcaatgaaagaatacaattgggaagagcgtaacatcatcagaatgcctggtgaaatcgccttgcatacggaagatttacatgtttattatggagataatgaagccattaagggtgttgatcttgaatttgaaaaaaatagaatcaccgctttaattggaccttctggttgtggaaaatcaacttatctacgttcgttaaatcggatgaatgatggaattgctagtgccagcgtgactggaaaaatcgtatataaggatgttgatgtcaacgcctcaaatatcgatgtttatgaaatgcgcaaacgtatcggcatggtgttccagcgtccgaatccttttagtaaatcgattcgcgacaacatcacttttgcgttaaagcagcacggaatgcgtgataaacagcaattagaagaagtggttgaaacaagtctgaagcaagcggctttatgggatcaagtaaaggataatttagataaaagtgctttggctctatctgggggacaacaacaacgtctatgtattgcacgagcaattgcgatgaagccggatattttactattagatgaacccgctagtgcgctggacccaatctcaacaggtaccgttgaagaaaccctggttcaattaaaagaaaactataccatcatcattgtgacccataatatgcagcaagctgctcggatcagtgactatactgcctttttctatttaggtcatgttattgagtacgacgaaacagccaaaatctttacgcgaccgaaaatccaagctacagaagattatgtatcaggtcactttggttaatatcagttcctcttttgcagttggtaataattgagtaaattactttataagtagccgaaccatacaaaaagcaacgtagaggaatgatatacggcttgaagatcagactaatttttctgacaagaaaaattaattcctaaatatgaaaaaggatgtcagttcctcttttcgcagtttgtaatagttgaaagaggtatatattgagtagccgaaccatacaaaaaccaatctagaggaatgatatacggcttgaagatcagactaatttttctgacaagaaaaattaattcctaaatatgaaaaaggagcgaacgaatgtcgaagattattacttccaaagaccttcatttgtattatggtaaaaaagaagccttgaagggcatcaacatggaaatagaaaaaggcgagattacagcgatgatcggaccatcgggttgcggcaaatcaacctatttgcggtcactaaatcgcatgaatgacttaattccaggtgtgacgatcacaggcagtgtgatgtataaagacaaagatatttatagtccgaaaacagatactgtaaagttgcgtaaagaaatcggcatggtgttccaacaaccgaatccttttccattttcgatttacgagaatgtcatctatgggttaaaattaaagggtgaaaaggataaaagcaagctcgatcaagtcgtggaagaaagcttgaaagctgcttcggtttggaacgatgtcaaagataagctgcatgagagtgcgttatccttatcaggcggacagcagcaacgagtttgtatcgcacgagtattagcggtcaatccggaagtgattctgatggatgaaccgacaagcgcattggacccagtttcaacaggaaaaatcgaaaacatgctattggaattaaaagaaaattacactatcattattgttacccacaatatgtcacaggcatcacggatctcagaccgcactgctttcttcttgcagggtgagctgattgaatttgacaagaccaagaagatatttttagacccagcaaaacaagaaaccgaagactatatttcaggaaaatttggttagagatagaaggagggcaacgatgttacgtacacaatttgaagaagagctgttgaatcttcacaatcagttttatgaaatgggcatgatggtctcaagcgctgtgcacaaatcagtccgttcatatattgatcatgataagaaattagcacaagaggttattgatcatgacattgaaatcaatgacatggaagttcgtttggagaaaaaaagtttcgaaatgattgccctgcagcaaccagttacgactgacctgcgtacgatcattacaatcatgaaagccagctctgacttggaacgtatgggagaccatgcggtgtcagtagcaaaatcaacaattcgcctaaaaggcttgccgcgaatattagaagttgaaaaagaaattaatgaaatgtctaattacgtaaaaaaaatggtagacaatgttttaattgcgtacgtgaagacagatgaaaaagatgctcgtatgatcgcaaaaatggatgagcgggtcaatgattatttccaaaaaatctatgatatgacgaccaatacgatggaaaaagaatctgataccattatcagtggaacggattatctgcatgttgccggctacttagaacgtgtgggagattatgtgacaaacatttgtgagtggatcgtttacttagcgacaggaaaaattactgaactgaacagtaatcgtaacgaaacattttaaagtaagtgccagttagagaattttctagctggtttttttcattttaaataggaagaaacacaatcttcaaaaagtcggataaaaagatgggtctttagtcctatgacaaatacccaaaaacattgcataatatgaatgtaaccaaaagtaatgtatttgctttttgaaggaggcaatttctatgaatgaaagacaacgaattttagaattagttaaaaaaggtattttatcaactgaagaaggtttagatttattagaaagcatggcgaaggcgaaggatgaagcgcagattaaacaagctgcggataaagtggattcttatcaccgcgaccaagcaaccaatttagttgatgagtgggaaacaggacaagatacagaagaagctaaaggttctgaaaaacaggacttggaagaccttgaggcttacttcgatgatttagcgacagaagcgaatcagatttctgctcgaattgatgaaatcaatcaaaagaaaaatgaattgaaagccgcgcttcatgaaaaacaagaagttttgatggagttggacacgaaagaagaattagatacattatcagaagaagatgatgacattcgtgaagcagtagaagatgaaatcgatgacttgaaagaaaaaatcgctaagttagaagaaaaagttgctgaagaagaagaagaactgaaaaatgttcaagacaaccaaagtgaaaatcgcaaagaacgtaatcgtacacgttttgatattccagacgatttgaaggatcaagcaagcgaaactttctcgcaagttggtgaaaaattgggagaagccggcgttcaattgagccgcttgatgaaaaagacctggaaaaccgtttctgatacggtagaagaaaatgttgattggaaagacttcaacgtcaaagttcctggtttagtaacgtctaagtttgaacatcaattcttatatactgatgttgaaccaaccttgatcgatatcaaattagcaaatggtaaagttaccttaaaagcttgggatgatgcggctattaaagtagatgccaaaatcaaactttatggtaaaatgaatgaagcaacgccattacaatcattaatggaacgcagccagatcgaagtgaatgatgaacatatctcattccaaatcccgaataaacgtgttcaagcagaattagtcttctacttgccaagacggacatacgatcacgttgcagtaaaattactaaatggtgatttgaacgttgaagagatggatgccaaggatgtatatgccaaatcaactaacggcaatatcaccttcaaacatattgatgcgacaatgcttgagatccaaggggtcaacggcaacattgagattcgtgaaggcgcgatcctagattcgattatcgaaaccgttaatggaaatatcgttacgaaagcagcgattcaaaattatggcatttcgttagtcaatggcgatgtgaaattgacggctggtcatgatagcctacaaaaaatcaaagccagctcagtgaatggtaatgttaaagtttctttaggaaaaacaatcggcttggaaggcttggccaagacaagtttaggcagtatcaatgatcgcttatcaaactatgaagtgatcagagagaaaaaagaaaagaccaatcgtttattacaattccgtcgagttgccgatgacatggcgaagatcgatgtttcgacaacgactggtagtattttcttgaaagatttcgacaattaggaaataataaggaaggaagattcatatgcaaaagagattacaaaagtcacgaacaaatgtggtacttacaggtaccttagccgggatcgccgaatacttcgggattgatccaacaatcgtgcgtgtgatttatgttttcttaagtttcggcttaatcggcgcaccggttgtattatatgtcttgttagcattggtgattcccgcagctccaagagggggacgggattcatatggacacaataatccatactatggaaacaacgactacaacaattatgagaaaaaagcgtcacgccaacgtaagaaagcggacaaaatcgacgatgatgactggagcgacttttaatgacttacctacagcgcttaatagctaatgcactgatctttatttcactgtcagtgctctttcctgatcatgtatatgtggaaagtctgatgatggctattactgcaagctttgtcctatccattttaaataccttagtgaaaccgattctgattttactttcactaccgttgaatattatgactttgggactgtttagttttgtaattagcgctggtatgctgcaattgacttccaacttattaggaaattatcgttttggcttttccagctttgccatctcaattctggtggctgtcgtcatggcgattgtcaatgcgatcgtttcagatcataatatcgataagtacacggataggtaatttacctatccgttttttggaaaaataattccttaaaagtgagctagctgtcaaccaatatgctattttgcagataagtatactataaaaaatctgattcttttaggagaacagcacctaaatcgtggctttacaaaatatttgtaaggcctttttttattctttcttggaaagttgtctctacctagtcactccatggataaaatgataaaatagagcggaagtgtagaaaagagggattatatggctgaaacagtaaaagtaaaagaactagttgataagctttcgttggaagtagtaactggagatgaagaaagtcttgaacgggtcatcaccactggcgatatttcacgtcccgggttagaattgaccggctattttaattattattcgcatgatcgtttacaactttttggaaataaagaaattaccttcgcagaacgcatgatgccagaagaacgattgatggttctacgtcgcatgtgcagcgatgatacacctgctttcattgtttctcgggggttgacaccaccaaaagaaatgatcgaagcagctagtgaacggaatattccggtactgagttctccaatctcaacctcacgtttattaggggagatttcaagttttttaaacggcggcttagcgcctcggacgagtgttcatggggtattagtcgacgtttatggattaggtgtgctgatccaaggggatagcggtatcggtaaaagtgaaaccgcattggaattagttaaacgcggccatcgtctgatcgcagatgatcgtgtcgatgtctaccagcaggatgaactgacattagttggtgaaccaccaagaattttacagcatttaatcgaaattcgtggaatcggaattatcgatgtgatgaatctatttggggctagtgctgttcggggatcaatgcctgttcaattagccgtttacctagaaagctggtccaaagataaaaaatatgaccgcttaggcagcggcaacacagaagtagaaatcgcagaagtaaaaattccgcaagtgaagatccctgtgaagactggccgaaatgtcgcgattattattgaagttgcggcaatgaatttccgtgcgcgtactatgggctacgatgcaacgaagacctttgaagatcgtttgacccaattaatcgaagaaaattctgggcagtaagatggttgctcaaataaatcgtgtggcctttgaattgtttggtcttcaaatttattggtacgcgatcatcatcgtctctggaattgcacttgctctatggatgtctaatcgtgaagcagtaagagtcgggctaaaggaagatgatatgacgaattttattttatgggcactgccgatcgcgattatcggtgctcgcttgtattacatcttgtttgatttagaaccctatcttgctgatccaatccaaatcttcaatacacgaagcggtggtctagctatctatggtggattgattgcagcagtcatcgtattgattgtatatactcgccataattttattgatccatggctgtttttagatgtagttgcgccaggtgtaatgctggggcaagcgatgggtcgttgggggaatttcacgaatcatgaggcttatggcggagaaacaacgcgtcaatttttagagagtctacatttgccgcagtttattattaacaatatgtatattgacggcgcttttcgtcaacctacctttttctatgaatcaatgtggagcctattaggacttatcctaattttgattattaggaaaaaagtcgcggttaaacgtggagaattgttcttaggctatgtgacatggtacagctttggtcgtttctttgtcgaaggaatgcgaacagacagtctctatttctttgggggacttcgcgtctctcaagtattatcactcgttctttttgttggaggaatcgctctattatattaccgacgaaaaaaacgaacagacatcaagttatatgaacgtgatcaaggaactaatcaagccttgatatgagaacctattatcagtttatgctatgatagtaaaaagaactttcttacgaaataaattatttactatgttatcaattcgatgaagtatttagaaaattgttatcttgttagctatcttctatttacaatcgaatgcgctattatgaactaggaggaaatttctttgaaacaaaaagttgcagttttaggcccaggatcttggggaacggcgttggcacaagtattagccgaaaatggacacgaagtaagactttgggggaaccatgcggcacagattgatgaaatcaatacttaccatacgaatcgccattatttaccggatttaaaaattcctgaaagcattaaaggtgagaaaaatcttaaggatgctgtgaaggacgcggatgctgttcttttcgtagttccaacaaaagcgatccgttcagtcgctcaggaatttgctcaagtggcaaagaacaaacctgtgattattcatgctagtaaagggcttgaacaagacacgcataaacgaatctctgaagttttaatcgaggagatcccagaagcgcatcgccaaggagtcgtcgttttatctggaccaagccatgcagaagaagtagcggttcacgatatcactaccatcactgctgcctgtaaagacgaaaaattagcagggtatgtacaaaagctgttcatgaacgaatatcttaggatttatacgaatccagatgtgattggtgttgaaatgggcgcggcattaaagaatatcattgctttgggagccggagctttggcggggctttcttatggggatgatgctaaagcagcgattatgactcggggattagcggaaatcagtcgtttaggcgttaaaatgggtgcgaatccattaacgttcatcggtttgagcggtgttggtgatttgatcgtaacctgtacttccgttcactcacgtaactggcgcgctgggaatctattaggaaaaggccataagctagatgaagttctagataatatgggcatgatcgtcgaaggtgtttcaacgacgaaagctgctaaagagctagctgatagtatggatgtcagcatgccgattacagaaacgatttatgatgttttatacaatgacaaagacgtacgtcaggcttgtcgagacttgatgatgcgtgaaggtacgtttgaaaatgaatttactttagaatagaaagagtgggataagatttatgcgagtaaaaaaagcagttattccagccgcagggttgggaacaagatttttgccagctacaaaagcaatggctaaagaaatgttgcctatcgtcgataaaccaacaattcaattcatcgttgaagaagcgctgaaatctgggattgaagatattttgatcgtaactggcaaagcaaaacgaccaattgaggatcattttgatgcaaatattgaattagaaatgaatttacaggaaaaaggtaaaaccgatttgttgaagttggttgaagaaacaactgatgtgaatctgcactttatccgtcagtcacaccctaaaggactaggtcatgcagttttacaggcgcgggcatttgtcggcaatgaaccatttgttgtcatgttaggtgatgatttaatggaagatcgtgtgccgttgacgaaacaattgatgaacgattacgaacaaacgcacgcatcaacaatcgcagtgatgcgcgtacctgaaaaagaaacgtcaaaatatggaattattaatccaggcgaagaagtttctaaaggattattcaatgtaaaaaactttgtagaaaaaccaaaaccagaagaagcaccaagtaatctggcaatcattggccgttacttgctgacaccggaaatttttgaagtgttggcagcgcaaaagccaggcgcgggtaatgagatacaattaacagatgcaattgatacgttgaatcgcacacaacgcgtatttgctcatgagttcaacggaaaacgattcgatgttggtgataaatttggcttcatgacaacgagtattgaatacggcttgaagcatcctgaaatcaaggacaaattacatgattacatcatcgccctaggcaaagaattaagcggacaaaacaaagtaaaaaaataatttcctaaagcgcagttttgaaactgcgctttttatattgatagttatttaaaaaaaataaattattagttttttaaatgccaatcatcactattactaatagaaaaaattagtctttttgttatataatgtctcttgaaaataactaaatacaaagaggaaaatgaatgaaaaattcccgcttaacgagagaaatcgtgattgattgcgcaatgagcttggttcatgaatctggccttcacggcttgagactaaataaaattgctgaacatctagaggtcaagtccccttcactgtatacgcatactgggagtattactgaattgcgtcaagcggtggtcaaaagagcaatggaggaatttcgtgaggagttagtggattccttacttggcagagcaaatctttatgcatttatcgaattaggtaaaacttgggctgcttatgcgaaaaaaaacaatgctttttatattgttttttatgaaaaagattacatagacttttatgaagaaaacatttcttttttcctaagagcggcatttgaacgaatttttctagaatgcgacctgactgatcaagaggttcttcaagttgaacgtgttttaacgaattatttccgcggccacgcagatagcttcgctgacagcagttttgatgagtcggatttgattagtgatttagagattatttacagtggtatcctgcaaaattttatgaaggtatctcaatgaattcgttgagatattttttttattagagtttattacaattctttctctttcattaatttctttgggaatggtataatttaagttagcataatgagtgaaaaatgagaggagcgattgaatgagtttaggcggtattgcggcaattattgcggcactcgcatttgttgtgttggtcatctttttagtgcgtgtcttgagtcaggtttcaaaaacagttgaaaaggttgagacaacagtaactgaggcgaatacaacaatcgatgttcttacaaaagatgttgatttactcatgcagcaggtggaaggattactagttaaaggaaatcacttgctgaatgatattaatgggaaagtagaaacgattgatccattgtttacggcggtggctgatttgagtcagagtgtttctgatttaaatacgacgagtcgaaatctggctggaaaagttggcggtgtcggaaagaatgcggcaaaggcgagtgtcgcaggaaaagttggcgcgacaacgatgagattctttagagatcgtaagacaacaacgaaaacggagggataacaacatgactaaacgtggaagattttttgcaggagccttaattggtggaacggcagcagctgtagtagcattgctattagcaccaaaatcgggcaaagagatgcgtgaagatttagcgaagaagacagatgagtggttagacttagcttcagattataccgatgattttgtatcaaaaaccagtgaagtgggatctattgtaaaagaacgtgcttctgatttgggcgatcaagccaatgacttagcttcaaacgtgaagagtaaagtaagtgattcgatggatgacatggatgatattacttctgatacgttagaagatttgaaacgccaaagctctgatttatctgatcgtttccgtaaagcagccggcgatgccaaagatgttgcagaagatgcttcagaggatatcgtgatcgatgttaaggagacaaaagaagaggcgaaggaaaccgttactgaaggcgccgatgagttagcagataaagccaaagaagtaaatgaagaaaaaccggctttcgaggaagtcaaagaagaattaaaagaagaagtcgaaaaaaataatccagaataaaaaatctagtcctcagctttgagggctattttttatgcggaaagtataaaagtttctcatgaataaatcgctttacagcaggagtatccatgtccggcttcacgaactagcttttctacgcatacagttactgctaaactccgttaagcagaactagcatttcggcaataagcaaaaatatttctaaatttgagaagcaccaagtaggtaccaatcaacatcagttctcttcgatcactgtgtttcttggcaatttagaaatattttggtcttattgctgagacacacagcgactgcttgcagagctgatgtggaacagtacctacctggtgctcaaaagctgagcgagttcgtgaagccttttttatgcagaaaaatcggtttgcttaagaaaatctttcaagaaatagactcattttaaaagtgttgcgtgcgcaacgcctgttgttgctgtaatctcaagatatagtaaataataatagaggagtaacgaaaattggaaataggaaaaattattcgttcaaaaagagaagaattgaagatgacccaacagcaattggcggatcaactttatgttacaagacaaacgatttcaaaatgggagctaggaaaaagtgaaccagatgcgctttcaaaaaaaagtttggaaaaaattttggccgttcaattagtgcaggagtcttcttcaaaagaaaatgaggaggaacatgttatgaagaaaattcagtggtttgtggggttgtttttatttggtattgcttttttaccattgcgctttttatgggttacgatacgtcgatactggaggcagccttggattcgttttgctgtgatgccagtgctgttatcctttatactatggtatttgcattcgcttaaggacaatgtcttctatttgtttttagcaatgattgtagcggcatacttgattaccagttattacttttttggcgatcgtgaaggagtaagggataattaaaaaaaagtgatccttatcaattaagatagataaggatcactcgcttttttctataagataatcaactcttttgatgtcttagtaaatggaatgcatccgtcttttgtcacatagatgcagtcttcgattcgaacgcctacatcatctggtaaatagatgcctggttcaattgagaagcacataccctctttaaccactaaatcattaccgcctacaatttgtggaaattcatggatcgttgttccgattccatgacctaggcgatgattgaagtattctccataaccatggctttcaatgacatcacgtgcgattttatcaagttcgccacaagtaatacccggttttaccgcttcttgtgcgcttagttgagcctctaggacaatattataaatatccttttgatgatcggttggttttccgcaggcaacagttcttgtcgcatcactgcagtaaccgttaacgatcgtccctaaatcaaacaagaccaattcgttttctttacacgtatttttccctggtgtgccatgaggactagcagcgtttggtccagcgagtacttcggttgggaaggacatttgtttgatgccttttttcttcaattcatattcgatttctgccacgatctcttcttcagtaatacctggttttacgtgtctgaagccaatttcaaaagcaagatccgcagttgagccagcttcaatcaactgttggcattcctcttcggtcttatataattgcaattcttgaactagcggagtcaagtcagctgaaaaatcagcagctgggaacgcttcgcttaatcgcaggtagcggtctagaactaattgatttttttctaacgcaatttttttaggagaaccgtaacgttttttgatttcatccacgatgatagagaacgggtcttggctgtctaagtagcccacaacatcatattcgaagctgctggctttagcatcttctacttcaagaccgggtgcaaatagaaaagggtctttttcaagtggaatgaataacgctaatacacgttccatcggattgctgtcaaagcctgagaagtagccaatatggctggcgtcagaaatataggctagatcgacattgtttttttgcatccaatttcgtaattctgaaactttttcttggttcattaaaacttccttctttctttcagcattattattattgtaacactgataaattttattggaaaacgatttttataaaacgcttacaaaattttgagaaaaaatgtgtaaaacggttgcaatcaatgaaacaacgtgctattatcttttagaaatgtaaatgatattttctgaaaacaattttaaaggagcatatccatggaaaagcaaacaattacgatttatgatgttgcccgcgaagctaatgtttcaatggcgaccgtttctcgtgtggtcaacggcaaccccaatgtgaaaccaacaacacgtaaaaaggtgttagaagttattgagcgtctcgattatcgtccaaacgctgtcgcacgaggactagcaagtaagaaaacaacgacagtcggtgtaatcattccggatgtcagcaatatgtttttcgcgtcattagcacggggaatcgacgatattgcaacaatgtacaagtacaatattattttagctaactcagacggcgaagcacaaaaagaagtaaatgtgctgaacaacttattagcaaaacaagttgacggagtgattttcatgggtcatcgaatcactgatgaaatccgtgcggaattctcacgttcaaaaacaccgatcgttttagctggttcaatcgatccagatgaacaagtcggcagtgtaaacatcgactacaaagcagcaacgaaagaatcaatcgacttattagcaaaacatggcaataagaagattgccttcattagtggcgccttaattgatgccatcaatggacaagctcgtatgggcggctacaaagaagcattagctgaaaatggtttagactataacgaaggcttaatctttgaagcaccttacaattttaaagaaggtttagcattgactgaacgcatcttaaatagtggagcaacagccgcttatgtaaccgatgatgaattagcgattggtttattggatggtttaatcgacaaaggcgtgaaagttcctgaagactttgaaatcattacaagcaatgactcattactgacagaagtagctcgtccacgcctaagcagtgtaacacaaccgttgtatgatatcggtgctgtcgcaatgcgtctattaacaaaaatgatgaacaaagaagagattgaacaaaaaacgatcgaattgccacatggtatcttcgaaaagggttcaacaaaagaataattttaaaaaaagctgtgccgatttaggcgcagctttttttgtaagtattctacatcgtcgaaggatgacgtcgagcaaaatcaaagaaacgaaatttatccacttgatgacgactttcagtatattggaattggcgggcatcgctggtaaaaacgcggctctttactgaaacgatattgatgtcatgctgattgagatcaagcagttcacgatcttcatcagtcaatgcatcaatcgtaatttctttttcagcgaaagaaatagtcaatccaagttggttttcaaaatagcgataaattgagtcttttgcaatttcagtatctaattctggtacgatagttgttagtagtatgtccttgtcgaggattactttcttttgatcaatggcacgcgtacggatcaatttccaacaaacggcgcctgcttcaaagcctgtcacatgggctgttttatcatcaatcacaatttttttaagactaacaacttcggtactactttcatagccataagaattctgcaattctttgtagctggtcagacctgatacaggaaatcgcaattgctcccgtttcaagacaagtgaccccttgccttggattttctgaatataaccgttagccattaaaagagataaggctttgcgtatcgtgtcacgagagacatgatagctttgccgtagtttgttctcgctgggtaggaaatctcctgcttcatacacaccctttagaattcctcgctcaatcgcctgataaattacttcatagtttttcatcgtgtcctccttctatataagaaactaattttgtattttgatgaacgatcatttgttaacttgtccgtataggtatttttattatacgaataaagatttagaatgtaaaacgctttctgctgctttaacaaaattaaaatgagtaaatttttattttatagctaacttgtttggtaacatccaaacctgtttgtagttgcaataccgatattctatgtttaatcttagctaactctttttttaatgagtattttctcataaaacaaaattccattaagatgtaagcgatttacaaaaaagcaaaaaccttttatagttaacttatcagctgaacttatccatacaagttaaaattattcggagggaaaaatgatgggaaaatatgaaaaggattcaaaggacctgctggcagcaattggcggaaaaaagaacatttccgcggtcacccactgtgctacacgaatgcggtttgtcttaaatgatccaaaaaaggccgatgaagctaaaattgaagaaatacctagtgttaaaggaatgtttaccaatgccggtcaatttcaagtgattatcggaaatgatgtcgccgtattttataacgagttcgttaaaatatctggaattgaaggagtatcgaaagaagcagccaaatcagcagcaaaacaaaatcagaatccagttcaacgcgccattactgttttagcagaaatttttacaccgttgttaccagcaattattgtcggcggtttgattttaggatttcgtaatattctagaagctgtaccgatgggttggctagatggtcaaacgattgttgaagcttcaactttttggagtggtgttaatggtttcttatggctccctggtgaagcaatcttccatttcttaccagttggtattacctggagtatcgctcgtaagatgggggccacggaaatccttggaattgtgcttgggattacactggtttctccacaattgctaaacgcatatgcagtgaacggaacgactgctgcagaaattgctaagaactggacatgggatttcggcttttttacagtcgataaaattgggtaccaggcgcaggttattccagcgatgctggcaggtttcttattagtttatctggaacgcttcttccgcaagcatataccagaagcagtctcgatgatttttgtaccatttttctcgttgattccaacaattttagccgcgcatattattttaggacccattggctggaaaatcggaacggctatttccgcagtcgtaaatgcagggttgacttctagcttcagctggttattcggtggtatttttggagcactttattcgcctctggtcatcacaggtttgcatcataccaccttggcgattgattcacagctgattgccgactttggttcaacgaatctttggccaatgatttgtttatcaaatattgctcaaggagccgctgttttagcaatagtgtttgctcatcgcggcaacaaaaaagaagaacaagtatcgattccatcggttatctcagcttggctaggtgtaactgaaccagcaatgttcgggatcaatctgaaatatacttatccatttattgcagctatgatcggcagtggaatcgctggattgttcgttacacttttcaaagtacgagcgctatcgatcggagtcggcggattgccagggattctagcaattcgtccacaggattatccaatctttgccatcggtatggtgattgcgatcgccgttccattcttgctgaccttgactttccgacgcatcggtctatttaataaaatcgatcgtgtggaagaaggcaatgtaccgactttaggcagcgagacaactaaaaaagctggggctgtcgttgaattatttgctccaattgctggtatgctgcacccattaagcagtgccaaagatcctgtttttgctgaggggatgatgggacaaggcgttgtgattgatcctagcgaaggcaaactatatgcgccatttgatggtcaaatcagcttactattcccaacgaagcatgcaatcggattagtcagtacagaaggtactgaagtgttgatccacatcggaatcgatacagtacagctggatggaaaatactttaccagtcatgtgaagcagggtgacagcgtcaaaaagggtcagctcttgatggaatttgatgtggaggcgatcaaagaggaagggtatgaagtgcaaacaccaatcattgtgacaaattcgaccgattttcaagtggatcctttgttggaagaagcagcagtcacaagtaatgaaaaaatcttaaccgcaacagaattatagaaagctggagggcgacatgagttttaaagagaaggtaatttaccagatttatcccaaatcatttttggataccaatcaagatggagtaggggatctgccgggaattgaaaaaaaattgccatacttaaagcgtctgggtgttgatatggtttggctaagtccaatctatccgagcccacaaaatgataatggctatgatgtcgctgactatacagcgatcaatccaatgtttggaacaatggatgattttgaaagcctgatggcaaccgccaaagataatggtatcgaaatcatgctggatatggtcttcaatcatgtttctattgagcatgattggtttcaaaaagcattagccggtgatcagaaataccaagattactttatcttaagagacaaaccaactgattgggtttctaaattcggcggaaatgcttgggcgccctttggtgatacagggaagtattatctgcatttatatgatgttacccaagctgatttgaattggcgaaacccagaagttcgtgaagagctgtttgaagttctgcgtttttggatggataaaggcattaaaggcttccgctttgatgtaatcaatgttattggtaaagacgaagtgttgattgattgtccagaaaatgacggcaaaccagcttatactgatcgtccaattgcccatgaattcatccgtatgatgaatcaagcgacctatggtgaggatgccgagatcgtcacagttggtgaaatgagttttactacagtggaagattgtatcttatatacaaatcctgagcgtgaagaattaaatatgactttcaatttccaccatttaaaagtggattataaagatggaaaaaaatggacgcaaatgccgtttgattttgcgaaattgaaagaattgtttcatacatggggaacgcaaatgagtgaggggaatggctggaacgcacttttttggaataatcacgatcagcctcgtgcgctaaatcgtttcatcgatgtggataactatcgagtagcaggagctaaaatgctcgctagttcgattcatttaaatcgaggaacgccttatatttacatgggagaagaaatcgggatgcttgatccagattttgacatgatggaacaatatgttgatgtagaaagtttgaatgcttatcaagagctgttgattgctggcaagtccgaacaagaagccttcgagatcgtcaaagccaagtctcgtgataattctcgtacaccgatgcagtgggatagcagtgaatacggtggtttttcaaagactgatccgtggttaggattagggaaatctgctgatgaaattaatgtagcaaaagaactgcaagaaggttcgatttttacctactatcaacaattgatcaagttgagaaaagactatccagtgattgcaaaaggcagctacgaggcttttttacctgagcatccgcaaatttacggttttgtacgccgcctagaagaacattcactgctggtgcttaataactttttcccaacggaaactacgatcaatataccagaagaatttttgactggaaacatattgattgataattatgagacgcaagctgttgaagaagtaatcacactgaaaccgtatcaaacaatcgccatctatcattaaaaaaacgcgtgagcaaatctgctcacgcgtttttatttcgtcaaatcaattcgtttattcactaagtaaatcaatataccgcctaaagacattgaaagcaattcgcctaacccgataattaaccaattgaagaaaaacggtgcttgataaaagaaggtcaattgacctgcgaccgtaaacatggaaaaggcaaaaatcaacgtggtaacgatcatttttttcttaaggctggtgattcttttggtgacagctcgacagatcagtaaaacgatcaatgtagagacactgccgaagagcacatcgacaatcccaagcggggaagccaggttggcgatcgctacgcctaaagttactgcgatcgtatagcgtttgttgaagaggggtaaaaaattgaacatttctgccaaacgaaattggatcgcgccaaagcttataacagataaaacaatcgtgacagcgacatacactcctgtcacaacggccattttagccgtatccgcagtcgtccagcgttgtgcggcacttttttcaagatgcatttttatcattctcctttacaagacattgtctcgttaataactgcgaccaaaggattgaagtgtcgcagtgcgaatttctcgctatcacttatcttagaggattttataaaaaatgcaagctattttaatagccagccgccgtcaattggtaaaatatttccttgcatgtagcgtgtttcttcactagctaggaacaaggtggcataggctacttcctcaggcttggcccaacgtttaacaggtgtttcttcagctacccacttagccatttgtccatcgccagcaaagtctgcttgattcatgggtgtctgaatcgcaccaggtgcaagggcgttgacatggagtccttcagcagcgtaatctaatgcaagctgtttagtgaagccgacaatggcatgcttgctagtggtgtaagcaataccacctccgccagctaccaatccggcaatcgaagccatgttaatcaccgttcctcgattttccagtagctcaggtaataatagcttggtcaatataaacatgctttttagattggtatctaaaatcttttcccaaaggtcatcctccgtattagccaagggcaaataattatccaatactccagcagtattcaacaagatatcgaccttgccaaaaattccgtgacatgtttcgatagctgctttcaagctatctttatctcgaacatccccgaggcaataggcaaaatgattgggataacatttttgaattgctgataaattcatttcttgctgatcaaaagcaaagacgcgagcaccagcctttaaaaaagcttgcgcttgagtagtaccgatgcctgaggctgcgccagtgacgaaaacagttttatcagtaaaatcaaagttcatcattcgacgattttccagtcttctgcaagaatatcacaaactgtcggagcaaagcttgaaaagccttcatcagccgttttaatcaaaaagtaaggcgtcactggtgcaccgtcaaacacttcaccttcaactaatgtgacatataactcgaaaccgccccagccttcacgaataatttttgcgccttttttcaattcgggtaatatttcttcaaacgtcaattgttgttcctccattcaaaaagttctttcttttggtagaataccaaaaagccaggaacgtcacaagaagtttaagaggagagaaaaagacctctccgaaaaaagagaggtcttagaaatattaatcatctgtttctgtatcatccttgttcttggcgttgactttgttacgagtattccaataggacttgtaatcttcgtcatttccgccaatcccaaattcataggcattatctgctggaccatcttttgcccaaagggaagtagtttcgccactaggaacttggtaatttgttccattatgactgacttttccaggctttagaccagtgaagtcagaaactttaatttgcttcacatcatcagacaattcaaatttttcgtcttcaccgaaaatcgtcgggttgacttgataaattctcgcggcaagataggccatataggtcgctgtccgatttcccgcgccatcattcattggtttgttgtcatcacgaccggtccatgttcctaacgtaatagtcggtgtggagacaatcagccagttatcggcataattatctgtggtaccagttttaccaacccaatccgcagtacttaatggataatttactccacttaagatggatttgaaaggagtggtgtgctgttcattgattacactgcgcatcatatcattcataatcgatgcggttgcttttgaatagacttgaacgggattgtccttgtgcttatagatttccttgccggtgctgtcagtaatagagtcaatcaagtagccttgctgataaacgccattattcgccaaggtttggaagccgttgatttctgttaaggttgaaacgtttgttgttcctaatggtgcggcttcaacaccccagtcattagaagttggatagttcatttttttcagataattgtcataagcaaactggtcagagcctttattcgttaataagtcttgatatacatgataagcagtaatattagttgattcgacaagtgcttctcgcgtagtctggaaggtcttagaacctttgttttcggcattcttcaattccttaccagcatcgtcgccatgctgatatttcattgggtaatcggcaatacgtgacgcgctccctaataatccttggtcgatcgcaggaccgtaaaccaatacgggcttgattgaagagcctgcttgtcgtgcagtgtcaaaagcgtgattattttggtttgtattgtaatcacgactgccgacaaaaccatatattctacctgtgctgttatccatcataaccgttcctggttcaacagtagcccctgaaccatcgtctaagtattggccgtattcagcgactcctaattgcattgcgtcataaatatttttatcaatcgttgattttacaaccagtccttgattttgcattttaactttggcttgctcgacataacgattgcgaacatcgtctttgttataatcagcatcgctgaccccatcttctttggcctgctgttttgccacgatgctgatggcttcgttatagacggtgtaatacaagaatccgtgttgttgaacctctacatcttgacgtccttggaagtcttttgaaaggtcatatttttttgcatcttcatattcctttttagagatcatctgttcacggtacatattgaacaatacatcatcttttcgattcatcccaagggaataatcttgcttcaggtcgccagtattcgtgtaaggactgtatacaatcggactttgcggcagacctgcaataaaagcagattgcggcagattcaagtcttttgcatgaaccccaaagattccaatcgcggcttcttcaacgccggcaatattttgtcccttgttattacgaccaaaaggcgaaacattcaagtaggctgtcaaaatttcatctttacttaaatatttttccaaatctaacgctaagacgatctcatttgctttccgtttaaaagaagtctcattagttaaaacctgttgtttgatcaattgctgtgtcagagtagaaccacctgatccagcaccaaagcctacaacttctcccaaaagagcacgtaccacagcttttgggacgacaccacggtgttcatagaagttttcatcttcagttgcgaccagagcttttttcacccatggagaaatctcgtcagaattgattttttcacgaattggatcagcttggatcgttgctaattcgcgatcatctgcataaagcaattttgatgactctgcgatatcgccgactttttgcttcatttccgattttgtaggtgtcggtgttccttctacaagatgggcaaaatacccagcaccgattccgacgacgagcatgccgcctaaaaagagcacaacaactaagccaagcagcaatgacttgactactcgcaaagagacatttaatgcaaaaggccctccaagacttgttcttgatttgcttttgctgctcttcttcggttgcttatttacttttttcttgtgagccaaaaagtccacctcattagattctatcattttaattatctgttgaattatagcaaagttttacttctattaacaagcggatgcaatgtttgtaatcaaaacttcaactaattgttaagtaaaacaaaacaaacatgattatattgtccggctttctttttactgcggactcttttttcttgatctagaacttcgaagaaatctgacgaatggcttttatttcactgttatttcggttaatatgggaaagtataagtcatttagaaatgatatgcgtaatgagtatatgcctaacggttagttagcgcatcaaaaataattaggaggaaaaaacatgcattcagacttttttcaagaactaaaagcccgtggcttaatttttcaagtaacagatgaagcggccctagaaaaacaattaaacgaagagtctgttaaactatatattggctttgatccaacagcagacagtctgcatattggtcatttattaccgattttaacgttgcgacgtttccaacaaaacggacacgtacccattgctctagttggcggcggtaccggaatgatcggagacccttcatttaaagatgcagagcgccaattaaacaccttagataccgttcaaagctggtcgcaaagtattaaaaatcagctttcggggatcattgacttcgagaataaagagaatccagcaatcgttgctaataactatgaatggttaggcgagttgaagctgatcgactttttacgtgatgttggtaagaactttacgatcaattacatgatgagcaaagaaagcgtcaaacgccggatcgaatctggaatttcatacacagaattcgcttaccagctactacaggcctacgacttctatgaattgaataaacgttacggttgcctgctacaattaggtggtagtgatcaatggggcaacattacttctgggatcgaattgatccgtcgagaagaaggcaagcaagcatttggtatgacgatgcctttgattacaaaagcagatggcacaaaatttggtaaaacagaaggaaatgcggtttggttagacgcagagaagacctctccatatgagttctaccaattctggattaatacagatgatcgcgacgctgttaaattcttgaaatactttaccttcttgagtttagaagaaattgacgtgatcgaaaaggaatttactgcagctccagaacaacgagcagctcaaaaggccttagccaaagaagtgactgttttagttcacggagaagaagcatacaatcaagcggtgcatatttctgaagcgttattcagcggtgatgtgaaaaacttaaatgcagcagaaatcaaacaaggcttcaaaaatgtacccaattatcaagttcaagcaggcgatgacttgaacttagttgagattctgataacagcaggcatcgaagcgtctaaacgccaagctcgcgaagatattaacaatggtgcgatttatatcaatggcgatcgcgtacaagatgtagcctacacattaagtgatcaagataaattagctgatgagtacattgttgtacgtcgcgggaagaaaaaatattttgttttgcaattttagttgtgattaggaaagggattgtaccaattttggagcaatcctttttctatgtagtgatgggaaaacgttttagaggttaggaaaggtgagcatgtgggagcaattttattaaactcgttaggattatttgttattatcttgattggctatctaacgaaacgcttgaacctattaatgaaggcagatggctcgatgatctcaaagattgtcgtcaacgtcacactgccggctgcgatcattgtgaatctgcaatatttggcagtaaaaaaccagttactattgctaattgttgctggtttagtattaaatctggttatgattctaatcggtcacttcttatcgagaaaacaagaacaggtagagcgagaatttttgatgtacggtgtttctggctacaatattggaaatttcgcgatcccctttgttcagagctttataccgcaggcgattccgattctatccttttttgatattggcaatagtgttatgctggctggcggctcgaatgtagtaatcgaaggcatcagtggcagcgatgaagaacgtccgagcgtaaaaaaagttctcggaagattgtttcgatcggtgccgtttctttgttacttgatcatgctgtccttgcgaattctagagcttgatttaccagaagcagtttttcaaattgcgcagccaattgctgatgctaatacatttttgtcgatgtttatgataggcttgtttttggaacttcgtttgccgaaaaaggatttagcattagttggacgtgtgttagcaatcaaatatggtgcgggcctattgctggtggctttttttatgctgttaccgtttccggcaatgatcaaaattgttttatgtcttgtttcagtcggaccgattccgacatttggcgtgatcaacagtgtagctgcaggaatgcgtgcagaagtggtggggttcacttcttcgcttagtttcttgatcagtttgccgttaatgacgagtttgttgatattcctataaatagaaaatttggaggtttttatgttaattggttctcatgtaagtatgaagggaaaagaaatgctactaggggcggcacaagaggcagctagctatgaagcatcaacatttatgatttatagcggtgcaccgcaaaatactcgccgcaagccagttgatgagatgaatattccagctggagaagaatttatgaaggagcatggcttgtcaaacattgtcatgcatgcgccgtatatcattaaccttggaaataccaaaaagcctgagatgtttccttttgcagtacaatttttacgcgatgaaattatgcgagcagaagcactgggagcgatgcagattacgttacatccaggagctcacgttggtgcaggagaaaaagctggcttagatcaaatcattaaaggactaaatgaagtactgactaaaaatcagcgagctcaaattgctttagagacaatggctggcaaaggaacggagttaggtaaaacttttgaagagttggcttatatcattgatggggttttattgaatgaaaagctttcagtgacttttgatacctgtcatacaaatgatgcaggatacaatgtcaaagaagattttgatggcgtattagaggaatttgatcgtgtgatcggtttggaacgtttaaaagtcgttcatgtgaatgattcgaaaaatccaatgggctctcataaggatcgtcatgcaaatattggttttggtacgattggctttgacaccttgaatgctattgttcatcatgaaaagttgaaagacttaccaaaaatcttggaaacaccttatgtgggagaagacaaaaagaaccaaaaaccaccgtatggtttcgaaatcgctatgttgaaatcgcaacagttcgatccagatttattagcaaaaattcaagcgcaataaaataagaggttgtgacagaagtggtcagcttcaagaaataagaaggaatttccgaagaagctacttctggaacaccgtttattcagaaaaagaagctatgacaagtcttttgtcacagctcctttaagcttattctctaacttgtccatcgccataaataatgtatttactggaagttaattgctccaatcccataggcccgcgagcatgcaatttttgagtagaaatgccaatctccgcaccaaaaccaaatttgaaaccatctgtgaaacgagtcgaggcattgatgtagacggctgccgcatcaacttctttcaaaaatttttgtccgttctgataattatccgtcacgattgcctcggaatgcttggaattataatgattgatgtgctcaatggcttcttcgatagaagcaacaactttgattgccaaaatataatccaaaaattctgttgaccaatctgcttcggttgctagatccgcttgtttcaaatgctttagcgcctgcgcatttccgcgtagagtaaccagtgatgttagttctttttctatcagaggtaaaaactctgccgcgatttcctcgtgaacgagtaacgtttcgatcgcattacaaacagagggacgttgaactttagcgttttttacaatgtttagtgccatgtccaattgtgcggcagaatcaacatacacgtgattgttaccagttcccgtttcgatcactggcaccgtcgcgttgcttttcacgcgttggattaaacctgcaccaccacggggaattaacacatctaaatagtcgtttaggcgcatcatctcatttgcgacatcatgtgaaatgtcgctgacaaactgaatcatagcgggattcaactgacagttgcataatgtcttttgcagaagctccaccaaggcttgatttgaatggaaggcttctttgccgccacgtaagatgaccgcatttcctgatttgaaacataaactagccgcatcggtcgtcacgtttggccgagactcaaagatgattccgatcacacctaaagggacgcgttgttgaccaatcatcaattgatcctctgtccgccacattttctctacgacaccaattggatcaggcaaggctgctacttggcggataccttcagccatttccttgattctttcatcgtttaaacgtaaacgatcaatcattggatcagaaatcccgttatcctttgctcggcatagatcttgttgatttgcagtcaaaataactgcggtattgttttccaaatcttcagccatctgcagcaagcagtcatctttttgagtagtttccagctgccccaattgttgcgcagcggagcggctctgttgccctaaggtattcatcaagttatccatgtttttcctccttaaataatgttccgacatctactccagctaaaatatcaaaaattattctgggaggtttcccattcgctaaaaccatggcactttttgcttctagaattcgttgagctgctttcaatttgctgaccataccgccagtgccaaagcggctgccttcaccgcctgcctgattcatcaatgtttgattgatggtcgaaatagtcgagtataaaatcgcttgtttatttgttgcgggattgtctgaataaaatccgtcaatgtcacttaacataatcagcacatctgcttccattaactgtgcaacgattgcggaaagctcatcattgtctccgaactttctcgtatgatccatttcgtctactgcgacggtatcattctcgttaataatcggaacgattcccattgaaatgagctgttctagtgtattgattacatttttacgactttcaggaaaatctactacatctcgtgttaggagaacttgagcggtttgttgactatacactaagaaacgttggttgtagatatgcattaattctgattgaccaacggctgcaaccgcttgctgaacagggatctcctgcggccgttcggggattccaagtttgtccattccaacgccaatcgcgccagaagagaccagtattatttctttgccttgatttcgaaggtcagttaatacgaatgctaattgatcaattccagcgaaattgatcttgccatttggatggatcaaggaacttgtcccaatcttcaccacgatccgattgacggatcttaaaaaatctctcatgcttccacctcttcacttagccaccagcgaggaagatattgttttgcattttagcatattctaatcaatatttcatcaaatgtttaaaatttactggaaatttttttggatcatgaaaatttatttcagttactagctgctaagatattgttaaaagggaaaattctttctttttcaaggccaattagtaagattagactaaaaatcttgtggattgatttgaagtttcttaaaacggcttttcttttagggtatcttttagtaaaatatacgagaatgtgtcaggaaaggagcggtgaaaatggtatcaactggaattgtagtattgatcgcagtaatcgctgcactattaggtgctgtcggcggtttcttcttagcccgtaaatatatgcaagactattttaaaaagaatcctccgatcaacgaggatatgttacgtcaaatgatgatgtcaatgggacaaaagccttcagaaaagaaagttcgtcaaatgatgcagcaaatgaaaaatcaacaataatgatgaaaggacaatcgtctcaggatggttgcccttcttttttggtagttgcacttttcgagtatgatggcgtttgagatgaaatcaatttgttaaaacagataaaattacacgaagtttagttagatcgtaagcgtgatgagaaccaaactaattttctcgtcttttgaaaaaaataatccttattactgacttagctgcgaatttgcaaaactgacaattagtaagcagatttgtcgacataataaatttagggttgtaaagtaaaggcgtatgggaggaatgtctgaatgtatgatgtaatagttatcggtgcgggcccagctgggatgaccgctgccttatatgcttcacgctcgaatctaaaggtgcttttgattgaacggggggcgccaggcggacaaatgaacaataccgctgaagtagaaaattatccaggcttcgagtcaatcatgggtccagagcttgcgatgaaaatgtatgatggagtcacaaaatttggcacggaaaatgcctatggaatcgttcaagatatcgttgatcacggtgactacaaggaagttatcactgaagataaaagctatcaaaccaaaacgatcattattgctacagggtgtgtccatcgtaaattaggcgtgccaggtgaagaatctttcgcaggacgcggagtctcttattgtgctgtatgtgatggtgcttttttccgtaataaacgcttgattgttgttggcggaggagattcagcggtagaagaagcgatttatttaacacgttttgcttctgaagtcgtgatcgttcatcgtcgtgatgaattacgcgcacaaaaaattattcaagatcgtgcctttgcaaatgaaaaaatttcatttatttgggacagtgttgtggatgaaatcgtcggtaacgaaatggtcgtaacaggcgcacaaatacgcaatgtaaaaactgatgacgttcatttagaaccagcagatggtgcttttatttatgttggtttagaaccattgactgagccatttaaaaatagtggtatcacgaatgctgcaggctggattgagacagatcaagaaatgaaaactaaaattccaggtgtttttgcaattggagatgcccgtgaaaaagatctacgtcaaataacgaccgctgtcggtgaaggcgggatcgcaggccaacaagtctataagtatatcgaagcacaaaattaataagtaaaaggtaagagaatctgatcattggttagattttcttgccttttttttataaaaaacattggatttgaaaaaatgctacaattgattgagacgattttgctgcttttctgcaaggtattaagcctcatgtaattaactaaaacaataaggagggaaccaattgtcagctatcaaactacgagcgtaccagcagcgagtcatcgatcaattagctagttatttggataatgacagtatccatattgttgctccgccgggatcagggaagacgattttaggaatggcgcttgttgagaagattcagcgaaaaacattgatccttgttccttcaatcctgttgaaaaagcagtggattgaagtgattcagcattactatccgcaatgggaaatttccgaggaactgcttcaacctgcaaatataacagttactacgtatcaatacttgtacagtaagaggaaagaattagacaatcactttactgaacatgggattggttttctagtgctggacgaatcccaccacttaaagaaaaactggtcagatttgctgctggacttaaaagaaaaagctactgagctgcaaacgttagccttaacggcaacacctccttttgacgcgaatcaaaaagaatggggcaactatattcggctgaccggtgctatcgatgaagaaattactgtctccgaattgattaacgaggcggttcttgctccatatcaagactatgtttacttagcaccagtcacgaaggaatcacagaaacaatttaccgaattcttaaatgagcaaaatcaaatcgtatcgcatctttgcagtcaaccagaagtgacggattacctcttggctcaagaattcattcagcagccgttaaatcaaacagaatttatctatcagaattttgacagctatttaagctgtttactttatttgaatgaacagcagtatcagttcagcgacgatcattggcaggttctgggtataaaacgaaataaaataaaaattccgcagcaaacaagaaaaagtattattgatttgtatcagtatctttttcaagttgttccacaattggaaatatttcgctatctttcaaagaagggctggttatatgaggacaagctccgactttttccagatttcgaaataaacaatcaagcaaatataccgttaatgaaagaggccatcgagcatattgtggtaaaggaggaaagctatctagggaatgaactgcggtgtgtactgctgtttgattatatcaagcaggaggttttagccggaaaagaggactatttagagtatggtgttgtgcctaccttcttatcattgaaggaactgattcggcctgaaacatctctggctgtcgtttgcggcgaatttctgattgtcagtcaaaaaatatttcaaactcattttcaaacttacgcagaatttcgcagagagaaaaagctggctggttatatctacttagcgatgacggataaaaaacgcagtgagctgttagcgttgactacgcagcttttggattcaagcgagatcaatctattgatcgggacggtcagcttgttaggcgagggctggaattgtcccgccgttaacacgattattatgggaaatgcggccggctcgtatgttcaaactcaacagattcgcggtagaggattgcggtgttccggggatgagaagctgaccaatatctggcatattgcttcgatttatccgaatattccagtgacagagcagccgctttttgctgctattttgaagcgtttatcatttatcgaaggcttgaatctgatggatgaacctgtgatctcaactggcagagaacggtttgaattacctgatatcctagatctgaggacaatcgccggctatactcaaaataatctttatcgcgcgaaagaacggaagcagcattttatgctttgggagacggctttaaagcaggggacccatttggcaatgcctctgttcattcgaagccggcctaaagaaacggaagtacatttagagtcgaatgcctttaaacttgataatgtggatcagctcaatcttattcaagcattcctgcaaggagcgttaaatatctactttaaggaaagaaaaaggaaaaagcattggcataaggcttgtcaggttcggcagaaactagttcaaacgctctatcagttactgctaaatgagggtgtactctcagaaagcatcccattagtcattgattggaataatcattctttttcttgtgaaattgtcgcgagttatcatcaggaaaaacttttcaatgagctgatttgtgagttattaggagagattcattcaccacgatatctgctaaaaattaaacaggattattttgtgatacctggtcgttatagcaaaaataaaaaagcggtgctaatttttttgaccgcaattaaacaacaaggattaacggccgacttttttatacgaagaatatttctggacgtaaacagctgattaaggcacgattgaattcactacaagcttccgatacgctggatattaacgaacgaaaaatttggcaataataacttgaaattactatggcagtcaggatcactgtattaaatcaggtcggatcttcatttatgtaaaaaatagcgcgactttttattgcatgttgaataagatacaagtttgctttgctgaatataacagtaatggtatacttaaatggtaagaaaaattttgaaagaggtgcgtttcatgtcttgggaacaagtttatgaacaatggattgattcagataaattagatgaaaaaatgcgtaaagaattacaagacttaggcaaagaccgagagttgaaaaaagatgcgttttataaacaactagaatttggaacagcaggcatgcgaggtgtcttaggtcctggtgtcaatcgaatgaatattttcactattcgtcaagcaactgaaggcttggctcgtttcatggatacgcaagatcccgaaacgaaacgtcgcggtgtggcgattgcttatgattcacgccacatgtcaccagaatttgcaatggaagccgctaaaacattagcaaagcatgatattccttcctttgtatttgagagcttacgccccacaccagaattatcgtttgccgttcgttttgaaaatgccttcaccggcattatgatcacggcatcccacaatccagctgaatataatggctacaaagtttacggcgaagatggtggacaaatgccgccagaagatgcagatgcattgacaaaatttgttcgtgacgtagaaaatccattagaagttgaagtgctatctgatgatgaagttaaacacagcggtttaatcaatattattggtgatgaagtcgattcagagtatttgagaaaaatcaaatcggtgaccatcaatcaagaactgatcaatgaaatgggtaaagagttaaaattggtttacacaccattacatggaacagggaaaatgctaggtgaaaaggctctaaaacaagctggtttcgaaaaatttgttttagttcctgaacaagcaatcgctgatccaaatttctcaacagttaaatcaccaaatcctgaagaacactctgcctttgaatatgcgatcaagctaggtgagcaagaaggagcagacctgttaattgcgacggaccctgatgccgatcgtcttggtgcggctgttcgtttgccagatggacgatatgaagtgttgactggaaatcaaatcggggctatcatgattcgttacatcttggaagctcataagcaagcaggaactttaccagacaatgcagtcgtacttaaatcaatcgtatcaagtgaattagcaacaacgatcgcagatgcctacaatgtaaaaatggttgatgttttaaccggctttaaatttattgctgaaaaaatccaacaatatgaagatgaccattcacaaacctttatgtttggttttgaagaaagctatggctatttgattaaatcctttgtacgtgacaaagatgcgatccaagcgttagtcttgttagcagaagtggccgcttactacaaaaaacaaggcaagacgctatacgatggcttgcaagatatttttgaagagtatggctactatgctgaaaaaactatctcagtgaccttgagcggtgctgaaggggccgaacagatcaaaacgatcatgggcaatctgcgtaacgaagcaccaaaagcttttgcggatgttgcagtaacaatgacagaagatttcaaaacttcgaaatcaattgatgccaatggggatgaaacagcgatcgacatgcctgcttcagatgtcttgaagtatactttggcagatgaaacatggattgccgttcgtccttctggaacagaaccaaaaatcaagttctacatcggtgtaaaaggagattcccatgatgcggctgctgaaaagattgccgcatatgaagaagcgatccgtaaaatcgccgaatagagtaaatgagggctgtaaatgaaggaacaagaagaagttcgagcggtcagtcaattttttaaaattttgagtgatcctacacgattaaaaatattaatgtttctaaaagagggcgagcgcaatgtctcatctatcagtgatacgctgaagatggagcaatccgcggtttctcatcaactaaaattattgcgtgacaatcgcttagtcaaagcacgtcgtgatggaaaggccatgctttatagtttagatgatcagcatgtcctggatgttttagagcagacctttcgccacgttacgcatcaataaaaagagcttttccaaattttttggaaaagctctttttttttacagaaattttgttatactgatagctaactattagaatacgatgaaattacttttaatatgaatgtaatttaacggaggcggattatggaaaaagcagtcaaggtaggtctattaggtttaggtgtagttggtaccggtgtcctagaaattttggcagatcacaaagataaaatcgaaaaaagtattggcggccccttggttgtaacaaaagccttgatccgtccagaagaagataaatctgctttagcagaaaaatatcaattggaattggttactgaattggacgcaattttaaatgatccagagatcgctattgtagtagaggtgatgggacggatcgaaccagccaagacctttatcaaaaaagcacttatggctggtaaaaatgttgtcactgcgaataaggatttattagcacagcacgggactgagttagttaatctggcgcgtgagcagcagcgaaatttgtattatgaagctagcgttgctggtggtattccgatcttacgaacgatcgctaacagcttagcagcagatgatattaccgaagttcttggaatcgtcaatggaacaaccaattatatgctgactaagatggttcaagagcatcgaacatatgatgagaccttgaaagaagctcaagaactaggctttgcggaaagtgatccaaccaatgatgtggacgggatcgatgccgcatataaaatggttattctaagcaaatttgcttttggaatgtcgatcacaatggatcaagtcaagatcaaaggtattcgcggattggcagcagaggatgtgtcgattgccgatcagctaggctacaccgtgaaattaatcggctcgaccatcaaaaatgacgatacgatttcggtggaggttggtccggtcttagtgccgcatgaacacccgctggcttcaatccataatgaaatgaacgctgtttttgttaaaagttcaggaattggcgaatcaatgtactatggtccgggagctggtgcacgcccaacggctaccagtatcgtggcggatttgatgacgatcgttaataagatgaagaaaaatactgttggtcatcgctttactggctatacccaaccaaccaaaattacttcaccagatgaaaacatcagcaagtacttcttatcattagaaatgcctgacgagcctggtcaatttttgaagctggctgagatcatgactgaaacaaaagtagggttcgaacaagttgtccaagaaaaaggcgatggtgaaaatgctcgtgtagtcttgattacacacgagacatcagaaacgaagatgggaacaattcaacaggaaatcaaagaaaaaacgagttacaaattactgtcattgatgaaagttatgggggaataaacatgtacgaaggtctattgaaacaatataaagagtatttgccaatcactgataagacacctcagatcgcattggctgaaggaaatacaccactgattcctttgaaaaatctatcaaaagaattagggattacgctttatgggaaatatgaaggcttaaatccgacaggttcttttaaggatcgaggaatggtgatggctgtggctaaagccgtggaagatggtgcaaaagcaatcatttgtgcctcaactggtaatacgagtgccgccgccgctgcctatgcaacacgtgcaggcatcaaggcgtatgttgtgattccagatgggaagatcgcaatgggtaaattggctcaagcgattgcttatggagcagatattatttcgatccccggaaactttgatgaagcccttaaagcagttcgtgatattgcggaaacagaagcggttgctttagtgaattcagtgaatccttatcgtttagaaggacaaaaaacagcggcgtttgaaatttgcgaacaattggaaaaagcgccagatgtattggcaattcctgttgggaacgccggaaatatttctgcctattggaaaggcttcaaagaatggcatgagcaaaaaggcacagaattgccacggatgcacggtttcgaagcagaaggtgctgcggcaattgtccaaggaaaagtcattgaacaaccagaaacagtagcaacagcgattcggatcggtaatcctgctagctggaaattagctgaagaggctcgcgatgaatcaaatggctatattgattctgtaactgatgaagaaatcttaaatgcatatcgcaaagtggcttctcaagaaggtgtttttgttgaaccaggttcagcagcatcattggctggtgtgattcagcatgtggaaaatggtcggatcaagccaggtgaaaccgtcgtaacggtctttactggaaatgggttaaaagatccagatacagcgatcaacgaaacagacatcaaaatcaataagatgagtgatttggaggatatgcgccgacacttacgtgaaggagtggctgctctatgaaaatccgcgtcccagcaaccagcgccaatttagggcccggctttgattcgtgtgggatcgcgttgtctcaatatttgacgatcgatatcggttcggaaactaaaagatggcagatcaagcatcagttgggcagcagcatcccttcggatgaaaaaaatctattgattcaaacggcattagatttggcacctaatttgaaaccgcatgaactcacgatgacttcagacattccaatcgctcgtggattaggcagcagctcttctgttgtcgtagcgggaattgaattggccaatcgtttaggaaatctaggaatgacgccacagcagaaagtgacctacgcaaccaagatcgaaggccatcctgataacgtggccccagcaatctgtggagattttgtggtagcgagctataataacaatgaagtaaattttgtgaagcatacgtttcctgattgcgatgtgattgcctttatcccgaatcatgagttgctgacttcagaaagtcgttcggttttaccaaaagagttatcctatcaggatgcggtcaaagccagctcgattggcaacgtaatgattgcggcagttttgaatggtaatttgccgctagctgggaaaatgatggaaaaagatatcttacacgaaagtcatcgccagcaccttgttccgcatttgaaaaaaattcgagaattttgcaaagcttatggcggttatggcagctttttaagtggcgcaggtccaactgttttagtattgaccccgcctgaaaatactgaaaaattagtcacggccttgaaagccttcgatcatgaagcgttgattgatgtgctttctgttgaaaaagagggcgtccaaatattttaattgcgtagaagagaagagtacaacgaatcggacttgacagagagcttcggtaattgagaagaagcagcagcgatttgttagaagatggcctcggagcaattgtcagtgagacacgggaatgcccgttacagcagttcgcagcaatgcgactaaagatcagtcttgtgagaggctgataaattaaggtggtaccacggcactcccgtcctttcagctatgaaaagacgggagtgttttttatattacgaaaacaattgaaaatgacaggtatgagaaaaattatgagcaacaatcgtgttcaaaaaaagctagtaggaggaataatgatggaatttgaaacaaagtgtttacatgcagggtatcagccggaaaatggagaaccacgagtattaccgatcgttcaaagtacgacctatgcctatgactcgacagaggaaattggaaagctttttgatttggaggcggcggggtatttttatacacgtttggcaaatccaacgactggtgcagtagaagagaaaatcgcggcactagaaggcggtgtaggagcattgtgtacatcatccgggcaagcagccaccttttatgcggtactgaatattttagaggctggagatcacatgatttcttctagctatatttatggcgggacctacaatctatttgctcatacccttagaaaaatgggaattgaagtgacatttgtcgatcaagatgcctcaaaagaggaattgttgaaagcggcgaaaccaaatacgaaagccatttttggcgaaacaatcgctaatcccgcggtgaaggtgttggatcaagaaaaatttgcatctgtagcaaaagagttggatattccttttcttatcgataatacgtttgcgactccatacttttgtcgaccattcgagtttggcgcagatatcgtgattcatagtacgaccaagtatttagatggtcatgcagtgcagacaggcggtgtcatcgttgatggcgggaaatttaattggaataatggcaaatttcctcagctctcagagcctgacgaaacgtatcatggcatcgtttatacagagaaatttggccaagcggcgtatatcaccaaagcacgtgtgcaattaatgcgagatttaggggctacaccttccccgcaaaattcattcttgcttaatttggggatggagacattaccggttcggatggatcgccattttgaaaatgcagtgacaatagcgaaatacttaactgagcaaaaagcgatcaaacacgtgtattatcctggcttagaaagtgatgaaaactacaatttagcgcaaaaatatgtgccaaatggcctttgcggtgtcatttctgttgaattcgcagaaggaaaagaacaggcggccaagtggttagacgcattggaacttgtttcattagaagttcacgtggcggatattcgtacgtgtgcgttgcatcctgcaacctcgacgcaccgccaactgactgatgaagagctgcagcaggcaggaatttcaccagggctagttcgtttatcttgcggaatcgaaaatgtgaacgatctccttgctgatttgcaacaggcctttgataaattggagggataactcatgccgattcgcttagagcctgattttccggcaaagtctgttttagaatctgaagatatttttgcgattgataattcacgtgcggagcaacaggatattcgaccgctaaaactattgattttaaatttgatgccgaataaaatcgacacagaaattcatctgctgcgtttgattagccaaagtcctttgcagattgatgtagatttcttaaaagtagctagccatgagcataagcatacaagtaagaatcatttagataagttttatttggatttttcacaggtaaaagagacttgttatgacggcttgatcattactggagcaccagtggagcagttggcctttgaggaagtcgattattggccggagttagtagaaatcatggagtggagccaaacgtcagttacttctgttgttcacatttgctggggagcacaagcaggcctgtattatcattttggagttgataaggttccttttgaaaaaaaattatttggtatctataaacaagatatagagcatcaattccgattgtttagaggctttgatgatcgtttttggatgcctcagtcacgatatacgggaatcaatgaagagcaagtgcgtcaagcaaaaatcaaagtgattgctaaggatgaggaagaacggtccgcgatcttaatctcagaagatgagcacgatgtctttttgatgggacactttgaatatgcgacagatactttagaaaaagaatatttgcgtgatcatgaacggggaatcaatacggcgaagccagcgaattactatgaagacgggaaaatttacaattattggcgtgcgcaggcacatttgttttatcataattggctgaatgacgtttatcaaataacaccttatcgcttagaagagattcgtgaattacaaaaagaaagaaaactgagatcgatttgatctcagttttcttcttccataaagtagtagctatggtcttctaaatccaaggcgctcatgatcatcgctgccgtttcctcgatcgaaagtgtggcaacgttaataatctcgcagcctaacttgtgataaagctcattggcgaatttcagctctgcttgaatcttttcgcgatcggaataggccgtttcaggattcaatccgtaagctcgcatccgttctttacggataccaatcaatacttcaggatcgttggtcagtccaacgatttttttcggatcgatctcaaatagctgtttaggaatatgtgcttgtggaattaacggtaggttagcaacttttaaatttttattagccaaataaagacttagcggtgtttttgaagttcttgaaacgccaagtaacacaacatcagcctctaagaagccgcggggatcttttccgtcgtcatatttaaccgcaaactccatggccttaattcgtttgaaataattttcgttcaagtgatgaagtgcaccacgttcgccagtaggctctaaatgagcgcgtcgtccaatttcgctcacaaccggattcaacaagtccatcgtaaagacgtcttcgttgtcacaaaattctttagcaattttagataattttggatcaatcaatgtatagatgatcatgccgttttcggccttagcatcgtttaaagctttcatcaataattcttccgtgtgtacaaaggtccggcggaagagacagaattctacggtaggatactgcgccattgaagcttgtgctagtttcgatgcagtttctcccgcagaatcggagatgatgaaaatagtgactaactcgttttgtttttcgctatccataaagaaaatctcccttgcaatcagtaataatttattataccatacactttattcggaatcattacactttgaaatgagggataacatgacacaaacgacgttattagaaaaagctctgacgaaggtcaaagaaaatggcttcaagtatactaaaaaacgtgaaactctcttagactacctgatcaaatccaaccgctatgtttccgcccgtgaggtttacaatcatatgaatggtcaatttccaggattgagctatgatactgtgtatcgcaacctaagagaattttgtgagattggattgattgaagataccgaattgcagggagagatgaaattccgctttagctgcagtgaaaattttgaacaccatcaccattttatttgtacagtttgcggagaaacgaaggagattcatatgtgtcccatgaacttctttaaagaacagctagatggctgcgaaatcgaaggtcatcgctttgagctctttggacgctgtgcaaaatgtcaaaaagttaatggataaattaagaatttaaattcttcagtaccttgactcaaaatagcccattggatataatgacttatggacggtcttgtttattgaaagcatatttcaataacaaaaacggttacatttcaagcccggagggagggaatttatatgtcaaaaacagtggttcgtaaaaatgaatctcttgacgatgctcttcgtcgcttcaaacgttccgtttcaaaagcagggactctgcaagaatctcgcaaacgtgaattttatgaaaagccaagcgtgaaacgtaagaaaaaatcagaagcagctagaaaacgtaagaaattctagtctgtcaacggagtgattctattgtcactacttactaccttgaatgaagacatgaagcaagcgatgcgagcaaaagataaagagactttgcaagtgatccggatgcttaaagcttcgattcaaaatgaacagattaaaaaaggtcaggacttaaatgacgaagaagaattgactgtcttatctcgcgagatgaaacagcgtcgagattctctaacggagtttgaaaaagctgatcgcaccgatttggctgataaggtcaaaaaggaaatcgtaattgttgaaaaatatttgccggctcaactttctgaagatgagatccgtgcgattgttacagaagcaattgcaacaacaggagcgacttcaccaaaggaatttgggaaagtaatgggtgcagtgatgccgaaagtcaaaggcaaagccgatggcaatcaagtcaacgcaatcgtcaaggagcttctgaataaataagcaataatgaaagccgagagatttttctctcggctttttttgcgagttcaacttttcgcagtttgttaaagtacgagatgaatgatatggtctcggctaattaatattacgtgaggtttagttgaatcgtatgcgtggcaaaaataaacttccattaactgagctagctgtcagtcacgcttttcgcagtttataaaaatagggccggagctgtagttacaaatttacagaagtatattgatcaagctgtttagcgtgatgatatgcgtacgaaaataagctcatttttcccggtttttggaaaaatgacttcatagatagacagttagctatgagttatgctttagtccgagctgctgttaaaaattgtgagattaaataataagataggcaaagtagtattgtatgcacaagataatctttaaaatagactcgtgatttcatcttaatcaaactcaggtatagctaatatttaagcgaaagcttagacaatttttcttttatttagagtgtggtattataagaaggaatgatttatgaagggatgagcgcttgttgaatagcaacgattttgagtcgttagaaataaagcttgatggaaaagatgacatcagtatgcttttaggtacccacgataaacatgttaaatttttagaagaaaatacagagacgaccatcaatactcgcggcgaaatgattcagatcattggaccaaaggaagaggcaaaattagtaggagatatcattcgcaccttgcagattttgatcgatcgcgggattaaagtcgcgacaccagatgtcatgaccgcattgcgtttaggacgtgagaatcatctggatgagttcgttatgatgtacgaagaggaattattgaaggaccgtaatgggaaacccattcgtcctaaaaatattggacagagccgttatatagcagcaatacgtaaatcggatgttgtttttggtgtgggaccagcagggactggtaaaacttatttagcaatcgttatggcaattgctgcactgaaaaaaggggaagtacaacgaattattttgacccgcccggcagtagaagccggcgaaagtctaggatttttgccaggtgatttgaaggaaaaggttgacccttacttacgtccgatgtatgatgccttgcatcaaatttttggtatggaacatacgaaccgcttattggaacgcggagtgattgagatcgccccgcttgcttatatgcgtggtcggacgttagatgatgcctttgtcattttagatgaagctcagaacacgacgatttcgcaaatgaagatgtttttaacgcgccttgggtttaattctaaaatgatcgtcaatggcgacacttctcaggtagatctgccgaaagggcaggtcagcggtttgattcatgccgaaagaaccttgaagggaatcaaaaaaatccgctttgtgaactttgaagctggtgatgttgtaaggcatcctgtagttgcagaaattatcgaagcttatgaacaagagaacctacgacaccaagaaaagtagtcaggagggaattggatgttaaatcgacccatcaataacttgctgaaaaagttaggttcaaattttataccaatcattttaggcgctttttcgactatattagtattaacgatgcttacgagcgtcattcaaaaaagtgtagattataaagaaggtcaagtggctacagaaagtattcgagctaataaaaccattgaaaataaagccgaaacggaccaaaagcgtcaattggccgctgaagcagtcacgccagaatatacatatcaagctgacttggcgcaaacacagcatgatcgtatcaatcaattaatctcattgattcaaaaggcgaatactgaattagataaaaattatcagacgaaggtttcacaagctaaagatggagaaaaagttccccaaccgacagtggatgagcgtgtagcagcggtaaaaaagaattttgaaggtttagatcaggatacagtcactttctatcaacagctgccagaagaattttatcaagccgttgtccaactaagtgctgctgatttgacgaaagttggaacagaaagtctgaaactgttagatgaacaaatgacaaaacgcattcgtcaaagcgatcttgctgaatacaaacagcaggccattgataagatccaaagtttaggattgtcagaagaatctaatcaagcaatgcgttacttattagaagcagggattgttatcaatgattccttaaatcaaaagcggacggatgaattgaaagagcaagccagtgattcagttcaacctgtaatgatttatcaaggtgaagtcattgttcgtgaaggcagtcaaattgatgcaaatgcgattaataagttgaaactattaggcttgactagctccagtacatctattttcccattgattgcaatggttttatccgcaatattacaaggtgttttgttatggttttatagccgtcagtttgaagttgagtttcaacgtgtccgcttcattttattctatagcgcgacgatgacgattggcgtttttatcatgaagatactgcaatcttttcaaggaggcacttcgaataatctagcgttgttcttcccagcagccttcattccactgattctgacggtctttgttaatcgacgagcaggggctttgtccgcagtttttcagaccgtttttgcactgtttatttactacaatgccatcggtacgaatatgctgcccgtcattttaatgacgtaccttttctcaggtacattggctgttatggtaaaacaaagacgcttatctgatcaagtgaagcaagcaatgctttggatcgtggcctttccagttgcctggtcgatcattttaagtatctatcaaggaatgtcctttactgattcgcaaacctggggactgctgctaggtgcttttgccgccagcattttatcctttattatgggaatgggacttcaaccgtatatcgaaatcttagtgacagatagcggtgtaattaccttaaatgaattaagtaatccgaaccatccgttgctaaaagaactgctggagaaggctcccggaacctatcatcactcaatgatggtggctaatctgagtgctaatgctgtggcagaaatcggcggtcgttcgttgttgacgcgagtagcctgctactatcacgatattggtaaaattcgtcatgcaaatttctttgtagaaaatttaccgactggggcagagaatccgcataacttcctgctgccggaagatagcaaacaaattattttcggtcatgtgattgaaggggcgaaaattctgaaggaatataagatgccgcaaatggtgattgatatttgtaatcagcatcatggaacaaccttgatgaaattcttctattttaaagccaaggagcgcaaccctgaagtaacagaagcagacttccgttatccaggacctaggccacagactcgcgaagctggggttgtaaacatcgcggatagctgtgaggcggcggtcagagcgatggatcatccttcgattgataagattacggagtttgtgcataatctgattgaggaacgaatcaatgatggtcagctagacgattccggattgacgttgaaagagattcgtatcgttgaaaaatcattgattagcggtttaagctcaaccttccattcacgcatcaaatatccgagaatgcaatcagaggcggagaaaatgaaagaagagcaagagaaaaaaggggaagagtaatggatattacgtttattgacgaaacagagcaggtctctgaagaaaaaattcaagaaatcgatggcgtattacagtttgcggctgactatttgaagctgccgaaggatacggaaatgtctgttacttttatggataatgcagcgatccaagtcatcaatcgtgattatcgcggcaaggacgcaccgactgacgtcatcagctttgcgctggaagaagaaggtgaagatgagattccgatcatcatggacgaggaagatccgatgccgcggaatttaggcgacatcatgatttctacggaacgtgccacagaacaggcagaggagtatgggcatagctttgatcgcgaactgggatttctagctgtacatggttttttgcatatcaatgggtacgaccatatgactcctgaggacgaaaaagagatgtttggtctgcagaaagagatattagatgcctatggacttaaaagataaaacagagaaaaacaaacattttatcacctcgttagaatttgcgattcaagggatcaagacagtctttcaagaggaacgcaatatgcgtgctcacgtggtttttggcctgatggcgattctggtagcatttttattaggagtctctgtgctagaatggctttggatttttttagccgtctttctcgtttggattgtggagattatcaacacggtttttgagaatgtggtagacatggtaaccgattgccattttcatccaatcggcaagaaaatcaaagatatggctgccggagctgttttagtgacgtcagtgtttgccataatcgttggtgtgattatctttttaccaaaaattattgagctttttctttcgggaaattgagtatttaaggttcagaaaggaacttttacatgtcagaacataaatcagggtttgtggcgattgttggtcgaccaaatgttggtaaatcaacattactaaatcgcatcgtaggtcaaaaaatcgcgattatgagcgataaggcacaaaccactagaaataaaattcaaggtgtttatacaacaccggaagcacaaatagtttttatcgatacgccaggtattcataaaccgaagcatcgcttaggcgattacatggtagagatggcctatagcgctttgcgtgaagtggatgccatcattttcatggttagtgcagatcaaaaacgtggacgcggtgatgacttcattttggaacgattaagcaaacaggaagtgcctgtttacttggtcatcaataaaattgatacgatccatccagacgagttattgacgatcattgatgactatcggacaatcatggagtttaaagaaatcatccctatttcggcgacagaaggcaacaatgtcgagcatttgctagatgttttagtcgatcaaatggatgaaggtccacaatatttcccagacgatcaaattaccgatcacccagaatattttatcgtttctgaactgattcgtgaaaaagtattgagcttaacgcgtgatgaagttccgcattcagtggctgtcgtgacggaatcaatgaaacgggatgagaatgacaaggttcatatccaagcgacgatcattgtcgaacggacaagccaaaagggtatcattatcggaaaaggcgggaagatgctgaaaaatatcggtacacaagcccgcaaggatattgagacgcttttagctgacaaggtatacttagagctttgggttaaagtccaaaaggattggcgcgataaacaaacttatctccaagactacggttaccgtaaagacgactattaataaacaaagcttcacgatttcttcgtggagcttttgttagctctgcttttcgcaggatgtttagatagacttttgttaaactgagttagatgttatcgaagagaggtgcgtatggatggcgcaggttggtgaaaccaaaggcatcattttatttagtcgggattataaagaaaaagacaagctaatcaagatcttcacggaatcggctgggaaggtcatgttttttgcaaagggaattcatcgtgcgaacaaccccttgcaaacagcggttcagccttttactgaagcggtatttatcgggaatttgaaaacggatggcctttctttcttaaatagtgccaaagatatccatcctatgcgaaagcttcaagaggatatttttttgaatgcttatggttcctatatcttaggtttaacggatgcagcgattgaagatcatgtgtatgatccggctttgtacgggttcactcgagaagcattgcagcgaatggatgaaggtgcagatggtgagacgatcatgaatatttttgaagttcaaatcatgcagcgcttcggagtttcgcttaattggcaggcttgtggagtgtgcggaaagaaaaccggcgccttcgatttctcctcgaagtacaatgggattctttgccaagatcactggcatttagatcagcatcgttatcatgctgacccacgagcaatctattttatccgcttgtttaacagtgtaacctatgaaaatatcaatacgatcaatctaaagccggagacaaaaaaagcgatccgccaaacactggatcaattatacgaagaatatattggcctgcatttgaagagtaaaaagtttattgatcaaatgggcgaatggcaagatgtattaatacctaaagacgcagaataagctgtagaacctattcaggactacggcttatttttttgtctttaactgtttacagaagaacagccaaatcagactgccggtgaaggacaagaaaagataaagaaaaatcatctgtccatttggttggttctgataaatgattaccgaagcaaatgtaccgatgaacagaaagtaaacgaaataaaagaaagtccggattttatcagataaagaggttctggtttcaatgaagtaggaagcgattaagaataaggtaacagtgagtatgttaaataagggtttaatagaccagtcatttgtatacagctcatgtgaccaatcggataacagtccacctacgagcaaaacgagaaatacgaaatacaaattcgtttttcttgattttcgggtattactcatcattagaaatctccagatcatttttatgctcacctagttttcccacatttttcattcctttagttttctaactttctcgttaagaaaagtatatcagaaaagtttgctgaaaaaatcaaatcttttatttcttactctgcaaaatgttcgctcattcacagattaccattgctaatttatggcaaaacgattaatattgttagaaaacactaaggatatatcagataaactaagaatacgtgtcgagctggtatgcgagatgaaaatcaacttcattttttatgaacttgaaaaaatgattacataaattgacttaggatgccagttcagcttttcgcagagtgtggcatctggtctgaatacaacaaagtagggcaaaataaagctcgaactgtttagctgaatggtatacggtaggaaaatcaaacttaattttctgcaaagaaaattaaatacataaaaatgacttaggagtgataagtgtggaagaattatgggaagtattaagacccgaagagcaaatcgaattgaaattaagaaagttatatactcagcatcattttcaaccttatcacttaaacaactttgaagaatatggtgactatcagcaaaattacaattttttgcgaaattcctccatcattacttttactggaaacgacggtcggacaatggcattgaagccggatgtgacgttgtcaattgctaaaaatacaccagatggcgaagcacgaaaggtctattatgtagaagatgtctatcgccatgatcgtcaggcaggcgagtaccagaaaatttatcagatcggtctagaaatcattgatgaaattacttgggatgatcagctggaaatgttaaagcttgcttgggaaagtttggcacaagttggtgaaggaacactagatctttcacatatgggaatcatcaatgggatttgtgatcgtttttcaattgaggatcgccaaaaggtcttggattgcctgcgagataaaagttctcatggcatggatgaattgacaaccaaagcaggattatcaaaagaagaagcggacaacttagccaaattggttcgtttatcaggagattttgaaacaaaatatcagcgtgccaaagttttgttggcgtcttatcctgaagcgcaggctggattagaagaattgaaacaattatacaaagcattgcagaaagaagacttatcagagaaaattcgtctgcgattagatttttcgatcatgaatgatgcggattattatagtggattgttgttccaaggcttcattaaagaagcgcgggaaacaattttatatggcggacgttacgaccgtttaatgagtcgtcaaggaaagcgtcaaggtgcgattggctttggattaaagctgaatcatgtcgggcaaaaactaccatcggataatcaaagttcagagtacttgaatgtagctctgcctaaggggcgaatgggagatgcggtgtatgatctgttcaccaaggccggagtggcagctgaaggtgtctttgaagacaatcgcaaactgattttttgtgatgaggttaataaattacgtttctttttagtgaagcctagtgacgtagcaatctatgtggagcacggagcagcggacatcggcgtggtaggaaaagatattctattagaaaacaaagcagacgttattgaatttttggatttacatatgggtgtctgccgattagcggttgctgcgcataatgatttcgaagaagatttttcacgtccgttacgtgtatcaacaaaatatccgaccatcactcgtgagtattatgaagggattgggcggtctgtagaattgattcatttacacggttcgatcgaattagctccattattagggttatccgacgtgattgtcgatattgtcgaaacaggcacgaccttaaaagaaaatgatttgaaggtgattcaagacattgcgccatcttctgctcggttgatcattaacaacgcgacatggcgctttaagcaagaacgaatccaaaaagtgatcgagaaggtgaggaagcaactatgagagtgtattcaactcaaacggatcaattagccgatatcttagcacgaaagtattctgagactgcggatgtatctgaggtggtcaaaaaaattatagaacgcgtacaacaagatggagatcaagccctttatcaattaatcaaagaaatcgatcatgtcactttggatacattagcagtcagtgaaagcgagatcgaagcagccttaaagggagtatcgccagaattattaaaggtgatggagcaggcgaaagaaaatattctatccttccatcaaaaacaagtacgacaaggatttgtttcaacagaaccaaatggtgttgtgatggggcagcggatcattcctttagcacgtgtcggagtctatgtacctggtggaacggcggcttatcccagtaccgtcttgatggatgtcctaccggctaagatcgctggtgtgaagaaaattgtcacgatgaccccaacagatagtgaaggaaatgttccagcagctatcttagcggctgcttctattgctggagtagatgaaatttacaaagtaggtggagcacatggtgtagcggcacttgcgtatggcacagagacgattccgaaggtagataagattgtgggaccgggaaatatttatgttgccacggccaagcgcatggtttatggcgaagttgatattgatatgatcgccggaccgagtgacgtgttgatcgttgctgatcatagcgcaaatcctcgctggattgcagccgatcttttagcgcaggcggagcatgatacactagcacaagcaattctggtaacgacagaagagacactgattgaaaaagttcaatcagaattagagcagcaattagcggtattgccgcgtaaagaaatcgctggagcagctatcgagaatacagggaaaattattttagtaaaagatttggaagaagcgatctctatcgctaaccaaatcgcgccggagcatttggaactatctgtatcagagccgtttgctttgttaggaagggttgaaaatgccggaagcgtctttttaggtcatcacactccagaggttttaggggattactttgcgggaccgaaccataccttaccgacagaaggaacagctcggttttattcgccattatcggtggatgattttataaagaagagcagctacctgtattataccgaagaggctatgaaagaagcagcctctgcagttgaactattcgcggagactgaagatttaatcggccatgcgcgatccatgaaagtgcgaagaggtgaataggcatgacatttttaaatcaaaaatatcaggatcttactccatatacaccaggagaacaagtaaacgagggagaattcattaaattaaacacaaatgaaagtccttatccgccggcccccagcgtggaatcagcagttgctgaggtgtcacaaagcttaaaccgttactcaaatattaccgtcgaagctgtagcaaaaccgttagcacagcatttaggtgtgaagcaggagcagcttttccttggtaatggtagtgatgaggtgctctcgtatatttttcaaggcttcactgaagaaggcatcgcttttccagatgtgacctatggtttttatcaggtatatagcgctctttataaagttgattcaaccgttgttccgttgaataatgatttcacgctagagctcaaggaatacgatgcgttggccggcacagtgatttttgccaatcccaatgcgccaacaggcatctatttgtcacaagcagaaatctgcgcctttttagagcgtcatccagatcgcttagttgttgtggatgaggcgtatattgattttagcggagcttcaatggtgactttgattgaaaaatatcagaatttatttgtggtaggaaccttctcaaaatcccgtcaattggcgggagcacgtttaggctttggcgttgggaatacggatttgatagcagatatgaatcgcttacgtttcagtttaaatccttacaatatcaatagcttaactcaagcagctggcggcgcagttttacaggagcaggaatacgtagatcaaaaaattcaagaaacaattcaggttcgagaatggagcaagcaggcgctgacaaagcttggctttgaacaaacagatagtcagggaaacttcttgtttgcaaaacatccgcaaattactggagaaaaattattcgaggctttgcgagaaaagaaaattttagtgcgctggtttaatcagccgcgtacaaaggattatttaaggatcactgtgggaacccaggagcaaatggagcagctagttaaagtattatcaacaatactagaagaggtgaaagcatgagaaaagcagaagtgacacgtaatacatctgaaacaaagattcaactggctctgacggttgatggtacaggacaacaaacgatcaaaacaggtgtgggctttttagatcatatgttggaattatttgttcgccatggacgctttgatctggaactggtatgtgatggtgatattgaggttgatgctcaccacacgactgaggatgtggcgatcgcgataggtcgagctttttctgaaagtcttggcgaacgtcgaggcatcaaacgttatggcagtatgctattaccgatggatgaagctttagtgatgtcagcgattgatatcagcggacgtgggatggctgtggtcgagctggatattcccagcgaaaaaatcggttcgcaatttgatactgagttagttgaggaattctttatcgcttttgcccgagaactaggtgcgacgattcatctgcaccaaattgctggtaagaatagccaccacatcgtggaagcctgtttcaaaggttttggaagagcgttaggtgatgcggtagcaatcaatcaattagcaccagatgagattccatcaacaaaaggaacgatcaattaagggggaagcctatgctagcaattattgattatggtgtcggcaatctctttagtttgtcgcgctcattggagtatttgggagtagaatgtcagattacacgttcattaaatgaattgaaagcggctgatcgaatcattttaccgggggttggagcatttggcgatgcacgaaaaaaactagaagaattgtctttagttgagccgattcaggagctggcagcttctggcaagccatttcttgggatttgcttagggatgcagctcttatttgataaaagtgaagagtttggagagcatcctggtttaggcttgattcctgggcgaattgtctcaatgcgtgaagcatttgatcaaatggatatcgatctaaaagttccacagattggttggaacaagctagatatacgaaatacagagtgtccgttggttaaatcattgggtgctaatgattttgtctattatgttcatagctactttgcaacggattgtcaagagcatctgatcgccgacagcgaatacggactctctatcccagggatcgtacaaaataaaaatgtcttcggtacccaattccacccagaaaaaagtggaggagtcggcttgaatattctaaaggcatttacggaggtaccggtatgaaaattttcccagcaattgatcttttggatgagaaagttgtgcgcttatatcaaggtgattatcagcaaaaagaggtatttggcgatgatccagtggcttttgctcaatcttttgaaaaagcgggtgctaagtatctgcatcttgttgatttggacggcgctaaggccggaaagctgcactattttggaatcgctaaaaaaatcgttgaaaacacaaatttatttgtagaagttggtggaggaatccgtgacgaggaaactattgagcattgtttgtccgcaggtgtcaaccgagtgattcttggtacgatcgcgcaaaaggaccccgatttcactcaagagatgctgaaaaagtacggaagtaaaatcgcgatcggtgtcgatgcgaaagatgaaaaggtcgcagtcgaaggctggctggaaaaaacggagacagatgcgtttgaattttgtcagcaacttgttgaatggggcgctgaaacgattatctttactgaaatctctcgtgatggtactggtgagggaatcaatctgccattatatgaaaagctcaatcagttgaatatcgaaattgtggcttctggcggtgtcgcatcactaaaggatattgaaggcttgaagcagttgggaatttccagtgcgattgtcggaaaatcactatacaatggtagcttaaagctagaggatgttttagcagtcggtgaggaggatgaccaatgatcgcaaagagaatcgtaccatgtttagatgttcgagatgggcgtgtggttaaaggtgtgaattttgctggtttgcaagatgtcaatgatcccgtgactttagctcgtttttacaatgaacaaggagcagatgagctggttttttatgatattacagcttcagcagaggaacgcggcttgttcactgatattttaaaaggtgtcgcttcagaagtttttatccctctaactgttggcggtggaattaatgaggtatctgactttgaacgggtcttgaattgcggcgcggataaggtcagcgttaattcaggcgcgattcgacgtccgcagctgattgaagaaggtgcaaaacgctacggcagtcagtgcgtcgtcttatctgtggatattcgacgcgttggcgatcaatggcatatttttgctaagggcggtcgagaagatacgggattagaggccttagactggattcgtcagggtgagcagttaggcgcgggggaattagtcatcaacagtatggataccgatggtgtgaagcagggatttgatttggagttgttgcaagccgttagtgaaatcacagcattaccaatcgtggcttctggtggtgccggaaaaagtgaagattttattgagttatttcagttgccaaaaattgaggcggggcttgctgcatcgattttccattatggcgaagtaaaaattccagatttgaaaaaacaattgatggcggcagatattcctgtccggatcgtttagggggcatatgatgactgaactaaaatttgacgaaaaagggttaatccctgtgatcgtgcaagatgctgaaaccaatgaggtattgactttggcgtatatgaatcaagaaagctatgaattaacattaaaggatcagcttatgaccttttattctcgcagtcgtaaagaattatggcgtaaaggcgagaccagcggcaattatcagcatttggtttcattgaagctggattgcgatcaggatgcgctggttgcgaaggtcaaaaaagatggtccggcttgtcacactggtgcagaaagctgcttcaatgaagtattatacggtgaagatacgcaggcaacgatagatacgttgtacgaattgattaaaggacgtaaagagataccacaggaaggcagttatacgagttacctgtttgaaaaaggtatcgagaagattctgaaaaaagttggagaagaatcaacggaagtcgtgatcggcgccatgaaggaagattataatgaaactgtttttgaaatctctgatttggtgtatcatgttcttgtattaatggtggagatgggaatcgatttgtcacaagtacgccaagagctggaaaatcgccacgttgttgataaaaaagtcaaacaggaacggatgcagtaaaatccgaaatttaggaggttcagcgatgttctattcaaatgcgcacactcacagtacgtggtgcgatggcaaagatagtttagaagatatggcacaagccgcaattgaattaggttttacggatctgggatttacttgtcactcaccggccctgtttgatcctagctgtcttggggtacagaatgaagtgacgtatcaaactgctttgcgcaatctcaagaaaacattagcgggaaagctaaatatcagtttaggcttggaatgggattattacagtgccgatccaattgatggctatgattatacggttggctccgtacattattttccaccacgtcaagggatttttcgcagcgtggatgaaagtccggaaagtttgatgaaaaccttaaatgagtggtatcgaggtgatcagatgcagatggtgcatgactattatgatacggtggtaagacatattgatcagaatcattcggaaatcgtgggtcattttgatttgattacgaaatttaatgaaaagcagccttggctggatgaagacagtgtggaatatcaggcgattgcttcgaaggctctgaatgatgtgattgacattattcaaagctatgatggaatggtggagatcaatacgggggcaatttctcggaattggcgtacgacgccttatcccaatcctttcctgctgaagcttttaaagaaaagagactgtccgattattatcaccagcgatagtcatgaaacatcgaccttgacgtgtcattttcctgaaacggttgaattattaaaaacgatcggtttcacagaaacgatgcaattaaaggatgggatttttcaagcgattccttttgactagccattttaaggaattcattttcgattggaactgaatttgctaaccaatgtacacagaaagatttgacaaaaggggtctggtgtcgctattatagaaccaagttgaataggtgcgaggatcaaatttaaaaatttgtggaaaacacagcgagtcagggatagtggaagcctgaaagggaaacaaattttgttggcgtttgtgagcacatttagtgaaagctgccaagcaactgcttggaagtagggtggaaccgcgttgatacgtccctatgtcgattatttcggcatagggacgtttttttgcgagttgccagttgcacttttcgcagtttatatggtgaaagaagaaaacaatggttttgaacaaatttgtgatcaaggttattagtgcaatggtatgcgtacgaaaataagctcatttttcctgtttttggaaaaatgaatttccttcaaatgagctagccaccctgcaagctaaaagacaataaacttcaataaataaaaataggaggaaacaaaatgagcaaattaacggtgcaagaaatgattttatcgttacaaaagttttggtcagacaatggctgtatgctgatgcaggcctacgatacagaaaagggagcgggaacgatgagtccctacaccttcttacgggcgatcggacctgaaccatggcgtgcggcatatgtagagccttcacgtcgtccagctgatggacgttacggcgaaaatcccaatcgtttatatcagcatcaccaattccaagtagtaatgaagccttctcccaaaaatatccaagagttgtatttagacagcttacgtttattgggaattgacccgttagagcacgatatccgttttgtagaagacaactgggaaaatccttcaatgggttgtgctggtgttggttgggaagtctggcttgatggaatggaaattactcagttcacgtatttccaacaagttggcggtttgcaggtcaacccagtgacttctgaattgacttatggtttggaacgtttagcttcttatattcaagaagtcgacagtgtgtatgatttagaatggagcgacggcgttaaatacggcgaaatctttaagcaaccagaatatgagcattcaaaatattcatttgaagaaagtaatcaagatatgcttttagagaattttgaaaaatttgaaaaagaagcgacacgctgtattgatgaaaatctagtgcacccagcttatgattacattttgaaatgcagccatacctttaacctgttggatgcacgcggggctgtttcagtcactgaacgtgcgggctacttggctcgtatccgtaacatggctcgctctgttgcgaagatattcgtggctgaacgggaaaaactaggcttcccattattgaatcaggagggcaaataagatggcgaaaaatctactattagaaatcggtttagaagaaatgccagcccacgtggtttggccaagtatcaaacaactagaagaaaaagtttcgaagtttttagcagagaacagcttgaccttcgaatccattgaaaccttttcaactcctcgtcgtttggcgatccgagtaaccaatattcctgatcgtcaagaagacgtgcaagaagaagtcaaaggtccagcaaagaaaatcgcgttagatgcggaaggaaattggagcaaagcagcagaaggatttgtccgcggacaaggtctaacaactgatgcaatcactttccgtgaagtcaatggtgtggaatatgtctatgtgacaaaatatattcatggaaaagaaagtaaagaagttttgactggcttattagatgttgtgaagagcatgaatttcccaaccatgatgcattggggcgatacgatgtttgaatacgttcgtccgattcattggatcatcgcattgttggatgaagaagtaattccatttgaattactggatgttcaaacaggtcgcataacagaaggtcatcgtttcttaggtgatcaagttgcattagccaatccaagcgaatacgaagcaaaattagaagaacaatttgtgattgcagatgctcacaagcgtcaacagatgatcgtaaaccaaattgaagaaatcgctgagaaaaataaatgggtgatcaatcttgatcctgatttattagaagaagtaacgaacttagtggaatatccaaccgcatttgttggcgatttcgaagagcgtttcctatcggttcctgaagaagtgctggttacctccatgaaggaacaccaacgttactttgaaattcgcaaccaagcgggaatgctattgccgcacttcatttctgttcgtaacggaaacagtgtgaaactagataacgtcatcaaaggaaatcaaaaagtcttggctgcacgtttggaagacggtgaatttttctttgaagaagataagaaattatcgattgaagactgcgttgaaaaattgaagaacgtaaccttccacgaaaaaatcggtagcatgtataaaaaaatgcagcgtgtcggtttaatcagtcaagtcattggaaagcgtgttggcttgagcgaggaagaattaactgatttgaagcgggcgtcagaaatctataaattcgatttagtgacgaatatggtgaatgaattcccagaattacaagggatcatgggtgaaaaatatgccttgctgaaaggggaaaaacctgccgttgccaccgcgattcgtgagcattacatgccgatttcttcagaaggtgatttgccaaaaacagcgattggtgcagttttagcgatcgctgacaagattgacagcgtactaggcttcttcgctgtaggaatgattccaagcggctcaaatgatccttacgcattgcgtcgtcaaacatacggaattgtccggattgtcgaagcacaaggctggaccttcccgttcaccgatatgcaaggggcgatcgtcgacgctgtcaacgaggatgttttggattatggaatccatttcaaccgcgatcaaaaagaattcattgagttctttaagggacgtatccgtcaacggctgcaaatctacaatgtccggcatgatattatcgatgcggtattggattcacaccaagatgatttagtccaagttttcaagacagctcaaatctttgatgagcatttgaccgatgagcactttaaagaagcgatggaagctttgacacgtgtaattaacctaacgaagaaaatggaaccagatgttattacctacaaggtcgatcctaagctgtttgaaaatgataccgaaaaagaattgtacgaggcggtgaaagaggccgaagatcaattcgcaaaccaaagcatggctgaaaactatcaaaccttgacgaatttgcgcccagtaattgaacgatatttcaatgaaaccatgattatggtagaagatgaaaaagtacgcgataatcgcttgaatcaattagcgatcatcactcgtatgacaaatgcgttagcaagtatcgataaaattattacgaaataatagaaagccttcgagtttgcgctcgaaggcttttatagtatcaattttaataataatggaatatacgcgagatataatagcactgaataacccaatgaagaagccgcgaacttctgatcggcaccataggaacgtgccagaatggggacagagttttgaaccggcatcgcagcttgaatgataaagacagagagcatcaaaggcggtacactgatccattgtcctaataaccatacaattaacggagagataacatatcgaccaacgatgacaccaataatgtctttatttaaagtcagatttttgattcccacattatagacgatgatcccgatgacaaacattgataagggtgtcgttaaattagccagatagcttaaaaaggttgcaatggaatctggaacagtaatgttaaccaagactgcacacaacccaagcaaaaaacctaacagtgctggagagaaaatctttttcaaaattggtattagatgaaaattgactgtggcctgttcaatttgaggattgtcgcgggcaataaaataaatacccaaggtccaaaagatcgttgtattgacgatgtaatagagcaggacataaggaactgcttgttcaccgaagattgccaaattaatcggcaatccaataaaaatcgtattggagcaagtgaacattgtagaaaaaattcctttacgagcaggagtaatccgaaagatgcgacaataggcaaagctcacaacaaatgttagcagcatagaaattagcgggatgatcatcccactgacaagatgcagaaattctgatcgagaaaaatttttcgtgattgtcaaaaacatattacagggcagtgcaatctgtaagaccagctttgaaaaagcatcgccgatttgattagagaaccactgcttgtatgtcagcacatagccgataaacattaaaacaaaaataaaaaagatattaatatatgcggaaaccattttttcacctcgcatctactatacagaaaaaagcgggtgtcatcaattgttgatgacacccgctttatctttctatttcagcaagtttagaaaataatttattaacagtaagctagttgtcgttatgttcttgataattcaacaacccagatagattttcgatctgttcttccaaactatcgccgactgtcgtatctttgatcaggatgcgtttcagatctctgtcgatcacccgtttcaaggaagtttcatcggcctgcttggctaataggctttcgacggattcaaatggatcatgagtaaccagctggaagccgtaggaattattcagtaacgaataaccagcgattcccgtggtcttctgatacgctttagaaagtccgccgtcaattacaaagagcatcccttcacccttaattggtgattcgccatcttgaaccttaactggtgtatgaccgttgataattcgtgaatttggcgaatatagagcaaattcctctagaatcatttgacaggtctcatgggtatcacgaaatttataataagggtttttgatttccttatgagtttttttgtcggcgatgaaataacgctcgaacgtcgtcatggcactcttgccaaactggggcgaaatcttgccggtccagcaattccagatccaatcagcatctggactatccgtttgctgactttgacatccagtacgaatttgctcttcaaagaaatttaaaaggtctttgccggcataatcttttccatcgacagtcaatggtaggaagctgccgtcggcttttagcggcagacaaccatgaaagagcagatgttgattgtatacaagatacattgagcccttattcaagagcagctgcatgtgctcttgcattttggtcgattgctggaaggaagccagcagcatatctaccacataatcttcttgcttagtcaaagcatggacatcctcttgcaaggtttggaagcagctgccctgcagcggatagtcctttccagctaaatgaactgtatttttatcgaaatcaatcttttcaaacaacaaccgatcatccatttgaaattcaggatgacgtttgatcaattggccttccaatttaaattgcaggatcgacaaggcttgatggactttctctaagctgtctaagctttcaatcgaataactttcactgctgtttttttccttcggtgtgaaaatcggattcttttcgtaatgctcctctgcatacatgaaaagcggccgcagattcagcgcatatgcctgttcgatttcatatagataattataacgcgcagcaattcgcaataaagtcattaaacaagcgcgagagcccgcgtaagcccccatccagagaatatcatgatttccccactgaatatcgacagaaggatgctgacacagcttatccatgatcttatccgcctctggtcctcgatcatagatatcaccaacgacatggagatgatcgactactagacgttggatgctctgacatagggcgataataaatgtccgaccttgttctaaatctaaaaggtgggcaagaatctgatcgaagtaggctgccttgtcagagtaattcgtatcggtgtacatcaattcttcaatgatataggcataacgcttaggaagtgcctttcttacttttgagcgcgtatacttggtcgaacaaaaggccagcagttctaatagctgacggattttttttcgataccaagagcgatctcgatacgcataaaactctttatcatctaatgcttcacgtggataggccactaaaattgttagcttatctttttcgtgctccgtcagacgatctccaaagagcaggctgattttttctttgatgttgccggcaccagtgcgcaggatatgatcaaaggcggtaaactccccatgaatatcactgatgtaaagttcggttcctttgggcaaatgcatgatggcttctaagttgatgagttcagtcatgattgcctccttggtactaaattctttttccaacatttgataatatttttcacgggttgatagcataacgtgctccccttttataagcgattatccaaatgctcacaaatcaatgtcgctgattcttcaatcgatttgttagtaacatccagagtaaaggcacccagttcatcatatacactcaaagcgtaatctacttcttctttgatccgattgatatctgaatagcgtgaattttcagctaagcctaaggagttcaaacggctcatacggattttcttctgaacttctggttcgatcatcaaaccaacaattttctctttcggaacgtgtttgatttgttcaggtagaggaacttccggtattaaaggaaggttcgccaccttcaaacgattattcgctaaatacatgcttaacggagtcttcgaggtccgtgaaatacccagcaaaacaagatcagcctccaaaaagcccttcgcatcttttccatcatcatatttcaccgcgaattcgattgctgcgacacggtcgaaatactcttgattcagtttgtgaacaacgccggctttttgcaacggagccacaccggttttttgatgaacgatatccatgaattggctcatcaaattaatgtattgcagacctgtccgttcaccgaaatcttcgacaattttagtcaaattttcgctgactaaggttgttaccacaacggcactgtctttcaaggcatcgcctaaaatacttttcaattcttcttcatcttttgtaaacggaaaacgataagacaaatcaaaattgactgtagggaactgagctgctgcggcattaactattttcagcgaagtctcgccgactgaatcagagatcatgtataatggtacacttgttttcattgttttcgctcctatcgattggtttcagtttgttttgcttgctgcatgatataattaaaaatacgtgatttcgtaatttttccgatcacttttttcggatcgtcttcactgactacaggcagtgaatcaacttgataatcaagtaagactgcgccagcttctaagatcgtgtaatccttcgtgcatgtttgcagatgcggtgcacgtgtcataacgaccgccactggtgtattttgcagattgctgttcaatgatgcacgcaataaatctttgcgcgacaataacccgacaagatgctgttctttgtcggtcacataaatcgagccaacgtcatacataaacatattagtgatcgcatcatgaatcgaagtgtcttgtggcgttagcagaggtgacagcatgatctcttcaactttgacagaaaagattttgtcgaacagaaattgttcgatgcccacacctgtgtaggtgtaaccaacttttgggcttgcttccaaaattcctgccatcgttaagaaggagagatctgtacgtaaagtagcatgcgagattcctaagtgatcggcgattttttcgccacttagcggttgatcgcgtttgacgatctcaataattttctcttgcctttgtgatagattcataggtcctcctagtaatgcattcgttcttctgtgagaaaaaatgaattggttttttcttttaattgtcattgagaagatgctccaaaaattcaatgacttgaatacacaccctattatacacgtaataactatataaacaacatgattgattaaataaacacatatttaaaaatttcagaaataaaaggggtattgctttctaaaaaaagagtttagcagtataattctttttgttgatatgaaataacccgttagtcaaggggtcaagacgccgcgttctcagcgcggaggcacgggttcaaatcccgtacgggttatacctagagttgatatccagttgggtgtcaactctttttttgttcatttttctagtgcatgtgaaagaatttgtactatatactataggtagtaaaacataactaggcgaggaggaacaacatggaagctgcgagtataaaacgactgttagagcaaaaatccaaagcagaattgggcttttatccgacacccttttatcggttaactaatttgtctaaaaagctaggagtcaatttgtttatcaagcgagaagatttttctgggcagagtctatttggcggcaacaaaatcagaaagctcgagtatctgatcggagatgctaaagaaaaaggcgcagaatatgtttttacttttggggcgactcagtcgaatcatgcgatgcagacggttgaagcttgtcgcaaagagggcttgacgccgatcttgtatttggttgcttatgttgaacctgatgagcaggatcttcgcagtaatttattgctggatcgaattttaggagcagaggtacatgtcattttgaaaaatcctggtgagacagaggcggaaatgagtgctcgttctgtcaaactagcacgagagcatatggataaattagcaaaagaaggtcataactgttacgagatttcgatgggcggcgctagttcgatcggttcagtcggttttatcgatggatttgtagaacttgcagagcaagccgcagatacgggagtagaatttgattacttggttcatgcaactggatcaggaggaacgatggcaggattagtcgccggaaagaaattattgaatcatcccatacggattttctcttttgatgtgatcggtcatgattccagttatttagacagttcagcgaaattaggaaacgaaagcttagtgtggctaggagcaaaggcttgcttaacagctgaagactttgagcatgacaatcagtattttcttcctggctatgaaatgccaagtgaggcaggaaatgatgcgattcgactattagcaagagaagagggactgtttctagaccctgtttactctggcaaggcctttgcgggcatgttggattatattgaaaaaggcaagattccgcaaggtagcaacgtgatttttctgcatacaggtggagccacagcactatttgcagaaaaagaaattttggggaatttattggataaataattattcgattgggggaataggaaatgagtaaaaaggtggtttggatctggtcgacaaatgcgaattaaggtaccagaggatttgcgactacatttggcatgttagtcagaccttataaatttcaaaaagaagttcgagaagctttagcaccagagtgggaagttgagtttatcagcgatgatatttcggaagatgaaatacctaaaggtgatgctactatttgcagtcgagccatggatatctatctagacaaagacagatatcacaaccttgtggtgatccctgagctggagcttatgcagtatgattattcagcgattaaggagaggatcgctgagtatctgtagaagttattttctttctatataaaaataattttatattgattattgaaccattcacaaaagggatggttctttttttgtaaagatatctttacttatttgtgagaaaggagtattctctatgtaaagatatctttacaaaaaagatcgagaggataaaaatgaacgttcataataaaatcagagcaatccgtgaatcaaaaaaaattcctcaaaagaaaatggctgaggagttaaatgtttcccgtcaaacaatgactgcgattgaaacgatgaagtacaatcccagtttggaattaacactaaagattgctcagtattttgaaatgccagtagaagaaatttttcagttgaaggaggaagaaaaatgaaactttttacagtagccatcataaatctcattggatttccactattattttttggttttatctcctttattccattttgtttttcagtgaaaaatattgtaactggacgtataactaatgaacagaataagaaaatggttgctgaagcatcgttggttagtatcggaactattttattgttaattattattcattggaagttgcctgagttattgccaaaagatttgcgacaatttcttttaccagggaatcaatattttattgcaataatcggtaatatgactttggatattcacagtattctcttttattcagcggtaataggattcgtttataaacttaaagaagttcagtatggaataatatccaagaatttcttttttagaaagaaattcttaccagtgatcgctgtgtcaatgctgtgcacttttttaccaaatcttattgatttattaatgaaagcataaattattattatcccactttttgtagaaatagacattttgtggaagaaggactttaaaaaattatatagaggagatttgataatgattagaatgactatggctgttatcttttgtgtggtaagtgtttattcatttattggtatttttacattatttagagttttagttagatttaagcagtatgatgagttagaaaggaaagctattatcgagacgttagcaatgagcatggtaattattttagttgtgaattttggacaattgattctatcatttataactccttacgattgggcaccttttattttttctggaagctctttggctttgatcggtaatactcctttgcattttgatagtttcttttttgactgttcaatacttggcattagttatatggttagacgccatcattttggattaataaaagtgaaaaacatcttgattccaattattattattctaatttttattcttatgcctctgatgcttcattaacaaaatagataccatcactatcggcaatattttttcttttcacgcgttcaagacaaaataatctatttttaagatcattcttcaaaatcgggtgaaattaatagtataatgaaaataactttttgtaatgttcgcttagggttgtcgcaacatttacacaaatagttaaaaattgttaagttggagtgattagatggaaaagcatttgaagaaagcaaaaacatggaacatggtattgattattttagggttgatttcggtggtatcatcggtggttgggttacccaaatcgttaaatccgaagctgagtgattacgaaatgatgggatcaatggctcaggagatgttcgattatgcaaataatccgctaataaaaggaatctcggtgttgtctctagtaatttcgatcgttttgttggttttctatttcatcgcgaataagaagttagcagatgagattatcccagcaaaatttccatactatattaaaattggttggagtcttttaagttcagcgattggtttcatgatgcagccaaaaatacaaatggaagggatggatttctcttttatgacgactgttattgggatagtcttccagattgttttcctaataccggcaatcttagtcattgttcatctatttaaagcagaaccagaggagtagcagaatgagaaagaaaaaattgacgaaaaagcaaaagatccgttggagtattctagccggagtgcttgcgctagtgctatttattggtgcatttgtttactctcaaacaaaaaattcaactgttaaagataacaaatacaaagcagttacactgaaaaaatctgatcccttgaccttcaatgggattgtggaagcaacgcatacacaggattattactttgaccaaacgttaggcaagatttctgagatcaatgttcaggatggacaggaggtagagcaaggtgctacgttgctgagctatacgaatactgaatatcaggaacaagcggacgagcagagtacgaatctagacaagctctatctcgctgtttcaaatgcgcaagaaagtctggcaatcgcacaggacaagcaggcaaaagagcagcagaaattaaacgacgcaacggcaaactataataacaccaatgaaaatagtgaagaaggagccgccaaaaaagagcaatacaagcaagaaatgacacaatatgaaagcagtgttgatgctgcggctgatgccgttgttcaagcgagacaagcactagaaagtgccaatgttgagctgaattcagcatcacaaagcgtaacgaaaatgcaagggaaagttagctccaccgttgctagtgcgacaaagggaacagcctatatcaatgaaaagggcaagaatgatccttctgttccagttgtgaaggtggttagtaatgaggtcacgatcgaagcaaaggcttctgaatatgattatccgcaggtccatcaagacgcgtcagtgaccataaaaccaatcacaacaaatcaagagatcgccggaactattacgcatgtaaataagctgccggatcaagcagaagtgactagtcaggctggaacagctggcggcagttcaactagctcagtctctaactatagcttcatcgtaaagccaactgaagaactacagtatggctacaatgttcaagtggttcttccgctgaatgagattcgtctgcctaaaaaagcagtgaagaaaacaggtgataccaaatatgtttttgcttaccgcaacggaaaagttcatgaggttacgattcaagcagaggataagggcgattacttcattttgaaggatggtctaaaagatggcgatcgtatcatttcaaatcctgacaaatcattacgtgacggtcaggaattggcggtggattaaatgatcgaactaaaaaatatcaacaagtattatcgcaacgatgaggagtcgctgcacgttttaaaggacatcaatctaaaagcggatgccggtgaaatgatcgcaatcatgggaccttctggctcagggaaatcaaccttgatcaatttgctgggctttattgatacgaaatttgagggtcagtatttattcgaagaagagaatctagtcgctacgaccgatgatcgcttatctaaaacccgcaatcaaatggttggttttgttttccaaaattttagtttgatcgagaactataccgtttatgaaaatgtggagctgccattgctttataatggtcatggttttcatcagactaaggaaaaagtgatgtcggttttagagaaggtcggaattgcggataaggctgaaaagcgcccgcgccaactttcaggtggtcaacagcaacgggtggcgattgctcgggcactgattaatcagccaaagttcattattgcagatgaaccgaccggcgcgttggatactcatacttcaaatgaaataatggagctttttaaagaactgaatcgtcgcgatcatgcgacaatctttctggttacccacgatccagaggtagtaccatattgtacacgcttagttaaaatcagagatggtgcaatcactgaagacaaggcggtgatcgaagaatgaaattttatgtaaattggcgttcttctcttggttcgatctttaagaataagaaacgtagcgcactgacgatgttcgggatcgtgatcgggattgcagcagtgattgctattctatctatcggtcgcggctttgagcgagacactatcgccagtttaactgacgatgaatcggatcaattgaaggttgatattaattttatcccgggtaatgacgcgttgtactactcaaatgtcgatatgattcaagcttctgatttgagcatcttgagagatgtcgagggcgtagaatctgctgactatccaaaaaatgatttaacctatatctacaaggaagttaagataaaggataaaacaaagaactatcggatcggcgttgtctcgaatagcggtgattctgtcagctatggtcgtgccatcagtgcttacgataatcaaacccagaataaagttgtgacgattgacgccagcttagctaaagagattttcggatcagcccgtagcgcagtcggccgtggtttcgaattggataatcaagtttttacgattgtcggtgtttttccagcaggtgctgaagaaacgatgttttcagaaggaactaccaaaattttattgccgcgtcaaacttacatccacttttttggaaatgagcaggatacgagtgcggtggttctgaccttagccgacgggagtcagctgaataaagttgctgatcgtgccattaagaagctagaatcagctggtgcgatgcgacagcaaggcgaataccatgtttctaatatggcgatgatgacagatggtatcagtgaggtgttaagcagcattacactcttcattagtgctgttgcaggaatttcactgttcatcgcgggagtcggtgtcatgaatatgatgtacatctctgtgtcagagcgaacaaaagaaatcgggattcgccgagctttgggcgccacgcgcggcgcgatccgactgcaattcttattagaaggaatgacgttgactttagttggggggattattggctatctattgggaatgatcgttgcttatgcgattggtaatgtaatggatatttcagtgtctgttgatctatttaccgttgctttagcagttggtgtttcaagtggtatcgggttaatattctctgtaatgccggcctcagaagcagctaagaaagatttgatcgatattttgagataaaggatgctttgattttcttaattaagttgctattaatggaaatcaactcataagtgttcagcgtcaagaaataagaaggacgttccgaaatttaccgagaaacccagtaacataggaactgatgataaatagatttactcagtaattctcaaatttttatgaatgatcagcttatttttcgccgatattacgtgtgagctgctgtttattcgcgaataggatcttccccaaaagtcttttagatttttggggaagatccctttttttcaaaataagaaatctagcgaaccctagacttgtagtttttctttaagtgcttcagttaatgtagcagaaaagttaatatcagctttattgctcaaatcattgaaattattagtgtcttcttaagtaatttattctcaaatttcttgtggtgaaatgctagatccattttaatcaggatcaacagatcatcagatgctaatgaaatgctatagtgaacagagggagtaggaaaatcgtcttatcatcctcagtatcaatgagtcaactggcaagtaaatcttttgccgtatagagagcttcatgcatgtcttgaccgaatgtagtggcgttatttaagtctggaaatatgacgttaataccagcatctgcaaaattgaatacagcgtaataaatcatcatgtggatcaagcctttctaaattttggatgttgcatcttatttaagtccgcttgcttaaagatattggttagcgttccgactgaaatatctttatgaacatgaaatgaaacgaagaaaaaccatcgcctcaagcgatggttttatctgtatatgttatttacgttgttgtttgccggcatttcgtccattgccgttcttattgtttttattcttaggttgactaacttgttttggtttaattggttcagcctttttgatgggctttgttactacttgttttggtgggtttttcttcaattcctcttgaatttgtgctttgatacgaggacgcatcaagacattggtgataaaggtttgaatacaactaaagacaccaccaactacccaataaagcgccactccggcaggtgatgtgaaggacatgaagacaatcatcaatggtgaagcaatcatcatactacgcattgtcttcttctgttcctcaggcacaccgattagcgaaatgtagccttgcaacaagtaagcgacccctacgaaaacaacgaggagatagcttggttttgccaaatcgattccgatgaacgtcgagtgctggataccttctgagaagcgagctgtgtaatagagtgctgagaaaatcggcatttggatcagtagaggcagacagcccataccgcccatcatgctgacattattctctttgtaaacagcttgcatttcccgctgtgcttccatttgttcttcttgtgttgttgcttgttttaccttttcttgagccgcgtcaatctgaggtttgatcgattgcattttttcagattggatcagagatttctttgattggttaattcctaatggcataatgattaggcgaacaataatcgtcaaaacgatgattgccagaccgtatgaccaatcgaagctggttaccatccaattaaggaaattctccaatgggacaacaagcattcgatagacaagaccagatgtatctggagtcccgtcactattttgacggacacagcccgataatagtaaaagaacgcccaataggccggagcctaaaagccaatttttaaatttattcatttaattcttcctctgctaataaaaatttatacaggaaatactatactagataacacaggccttttcaatcaaattcgaaaaaagtcagggaaccttgtcctttttttaatacaccacattaaactgcgtgtagtccttaatggtaggatcttcgtattgttcaatatgggaaactttggcaaaaggattttgcggtattttgagcttttccaagaattgatccaattgctcttttgttccaactgcttcaatggtgacactgccgtcatcttcatttttcactgtaccagtcagtccaatctcaattgccagttgataggttgtataacgaaagccgacaccttgcacgcgtccagtcacatttatatacttcttcataagaaagcctcctattaatttatttcttattctctatgatagcgagttttgctggttgttacaagaattcgcgtgctataatgacaaacgaaacgataaatgagtgaggggaacatgttgaaagaaatcctatcaagtaaaaatacattaatcaaagaaacaaaaaaattgcagcaaaagaaatatcgtcagcaaacacaaagctacctattagaaggctttcatttaatccaagaagcaaaggcagccgatgtcatcctgaaggaagtgttcatcagccaacgtgggttaagggagtggtctgaatggatcgaagaaaagctcacggattactctttggtttctgatgaggtcttaaaaacattagcaagtcaaccaactccgcaagggataattgcagttgctgagatgccgcaagaagagaaagaagattatgctggtgcgtggttattattggacaatgttcaggacccggggaatgttggtaccatgattcggactgcggatgcggctggctttactggtgtcattttaggcaaaggcagtgctgatctatataatcctaaaacgcttcgcagcacacaaggcagcctttatcatttgtctgtcagagttggcgatttaacagaagtaattccacagtttcagcaagctggaagtttagtattaggaacagcattagacaaagaagcgaaggattatttaaacgttgagaaaatgtctgactttgctcttgtgatgggaaatgaaggtcaagggatgtcagcagaattattagcgttgaccgatcaaaatctttacattccaatcaaagggcaggcagagtctttgaatgttgcgatcgccgcaggagtcctaatgttccatttacttaaataagtcttcacattttcgtaactgttattaaggaacccttaaacttttttcacaaactcatggaagcctattcaatgttcgtgagccgtgatataatgagcgacagaacgaagagaagaaaaggggcttttttatccatgacagaaaattggcgtgacgacgaagaatacgtttcttatattgaggatttactagctaccgatgaagtacaaagattagcagattatacccaacatatgaattcaacacgattggagcactctatcagtgtttcttacaatagctacaaattagcaaaacaattcaatggcgatgcaagagcgactgctcgtgctggcttactacacgatttgttttactatgactggcggacaacgaaattcgatgaaggctcacatgcctacatgcatccacgtatcgccgtgaagaatgcagaaaaaatcaccgaattgtctgaccttgaacgtgatattattattaagcatatgtggggagcaacaatcactcctccaaaatataaggaaagctacatcgtaacgatggtcgataaatactgcgccattagagaagccgccgtccctttagtagatagatttaattcctacaaagcacgactaagaaaagaatggaactaataaaacaattttaggcaccaaacaaaaacttgtttggtgccttttttgtcagtcacgctttttgcagtttattagtgttaatgcagacgttacttagtataagatatcttgattgaataggtttagcgtgatgatatgcgtacgaagataaatttattttacacggttttgtcaaaggatttacttagtaagagttaggccgcaatcgcctatatgaagctattattaaggttagtaaaacagtttacttgttacgagaatagaaagtgaggacgaggcttatcaaaccaaatatcaccaaacagttattttttgctgtaataggaacatttattgcagcagtcggtatccgtttgatcgttgttagcggattaggagcagatgcgatcagtactttagtcttaggcattttacagcatgtgccattgaaattcggaacggttagcatgcttttcaatgggataattttagtcatggtttttttctatgaccgaaagatgatcggaataggaagtattatcaatagcttcgggataggtttttgcttgaatttattggattggacagggattttgcatacaattccggatggaacgagctacttggtaatcatcattggttcaatcgtatttggtttcggcactggtatttatttgttagcggattcagggtcggcggcttatgaatccttgatgattttattgaagcgaatgctaaagagttcagtcaaggttgctcgaattgtactagacgctattttctttttgactgggttccttttaggcggacatattggcttagggacattgattgttcttttattaatgggaccatcgttggaatttactttgaaccaattgccaaagctaaaatttttccgtgtgcaggaagcaaaataattgctttgaattgtttttgatagatcagatgattttttcctagtaactacaagggttatttgctacaatgaataaggttcattttatggtagatttggatcagaataacgatccatcgagttttcatagtagagaattcgaacatataaaataggaataggagtgcttattaatgatttcagcaagcgatttacgtgctggtatgacttttgttcaagacggaaagttgatcaaagtattagatgctagccaccacaaacctggtaaaggaaatacagttatgcgtatgaaattacgtgacgtgcgttctggttcaacgtatgatacgacattccgtccagaagagaaatttgaaaaagcgatgatcgaaacaaaaccagtacaatacttatacagccaagacgatgtagcgattttcatggatttagaaacctacgaacaatatgaaattcctgtaggcacgattgaagaagaaatgaaatacattcttgaaaatatggaagttaaaattcaattctttggtgacgaagtgattggtattacgttgccaacatcagttgttctgaaagtcgttgaaacacaaccatcaatcaaaggagcgacagttactggttctggtaaacctgcgacaatggaaacaggtttagtcgtgaatgttcctgactttattgaagaaggcgaaatgcttgaaatcaatacacaagaaggcacgtaccaaaaacgcgcgaataaatagttaagcaaacaccacgattttaaaagatcgtggtgttttttcgttctctaggtacaatctgagaatatttagattaaaatcggaatataggactccaaaaaagactaattacaccttcagaagagggaaattagtcttttgtattatcatttatcactatgtacaacttcacatatgcatccatttcaaataaaacataaaaagcggatttacttctatcagtaaaaagaaaaattggcttatttgttatgcagaagagaactgtgataataggtatcttaaagttagacataatttcaaatctatgaaggaaattaatcagcactttttctcatattaaaaaactaataggagtaaactcggtttattagaatgattatgtttttttgtataacggaaaattatgatatgtgtttctttttttgctgaaaaaataaattaagttattaatcactttaaaattagtgtaaactgtaactagggttgaaaaagttatcaaaatttatagtgaggagaatataggatgaaaaagaaaatatttaaggctattgttgttggttttgcttttgttagcttagctgcttgttctaaaaatgaatcagctaatacttctaaaacagtagagaaagaagcttcttcagaaacgaggaaagtggtcgagaaatcttctgcttcttcttcagaagtaatacttactgaagaaacagcaagttcagaagaaggtaactctaagctttttgaatttatgatcgaagcggcacagtctcaacttcctgcgatgaaagagcaattaggagcagcttattcaaacattgaaattgctgcgggtgaaaatcacacaattatttatcggtatactctgcctgaatatccaggctttgaaatggatagtgcatcattaaagcctgtgatggttgaggcaatgaaaccaatcatggattcaatcaaagggatggttcctgatgcgaaaattcaagtgatctatttaagacccgatcaaactgaggtgggaaatatcttgatcacacaagaagatacggatgccatacaaggaaattctgatcccgtgtaaagcacctagcaaaataataattaggtaacttcgtataacccatttgttttgtttggaaatcgcgtcatctaaaactaggatgtttggagaatataggatgaaaaaatggattgttttagtagtaatgattgcagctttagctggatgcggctcaggtggagcaaaggaaaacagtaaatcagagaaaaatagcggatcagtatccacgacagaagtttcaacttcaaaaacagaaacatcttcttcagaaaagaaaatagaaatgaaggatgttgattttcaagttgaaggaacgaattataaaatgaagattttagataactggaaagttcttgaagacgacgaattctcttttagtgccgagaatgataataacgttgaaggagtaatggtttcaggagtaaagaagaccgatgtcgatgatttcgttgctttaaagagtgcgatgaaagaacaaatgaaatctgatgatgaagttcgaataaaagaagacacgattaaggaagagccatatcaaacaccccattatacaggagaactttatagctttataggagttgctgatggagcaaatacagaaatccgcttctattttttagaaacagagacggagtatattattcttaactttgtaggactgccttcattctttgaaagaaatggtgagcttgttacagaggtggtacgctcattcgtagcaggataagctgagatagtcaagaagcttaaacttttcacgtttaagcttcttctttatctaaaaagaaggctattatttggtttgcgaggattctctgtttaaggaaattagcccctaccgtgctgaatggctcagattctccgccaattcttctaacgcctggatatcacaaatccggtaatagcttttctgcttttccaaaatctgggcatcgcggaaattggtgattgttcgtaaaaggtggcgatagctgacgtttaagattgaagcgcaggtagtcaggcgaaatgaaaattttccttgcttctgatgggctagaataaatttcgccagtcgtgtttctaccggttcaattaatgagtttgcgaggttgatgccggaatttaaccgatagcttagcagttggcaaatattctgtaagaaacgaacatcttgctgcagggtgttgcggtattgattcaagggaatcgaaacacaaatacaatcagtaacagccttgacactgcttttaggcagaaggccccataatgatgacgcttcccccagtggcgtagcgattgtgacaaaatcaatgcaaatattttgggtatcagaggggtaggaataaaccatcatactgccctccaccagaaaatacaggtaatcagaagtggttccggtacgaatcaaatgttcttccttttgaaaggactgcaaagaagccattgttaaaatgtcagcatccatataattttgaagatcgtgttgcttcacgtaagcagccagcagctgagaatcgtgaattttcttcataagaaaccactcctaaagcgttcatttttttcattatagcttagaatagattgggactcaacacgaacaattattctgtttgtttgtaaattgtatgtaaaaatcgtgtaaaagatgacacgtgtcacttcattattttgatgaacttgctatgatttagaggtaatagaaattatttccaacagggggagaaaaaatgcaattcaaacagttagcaaaaggtttcataggtgtgatgttactaacagcattgacaggttgtggtagttcgggaaataccagcgatagctcaaaggataccagcaaggaaaaattagttgtccaatttgtgccaactaataacgatggcagcatggaagccaaagcaaaaccttttgcagactatttatcgaaaaaactagatcgtgatgtcgaggtaaccttagcaaccgattattcaacaattgttgaagccatgtcttcaggacaggttgatgtaggaattatgccgcccgcagcatatgtacaggcaaaagacatggacgttgcagaagctattttaacgtctcagctaggcgattatgatcaagagtctggtctgccgctaaaagacaaactgactaataccttcaaaggagaagttctagtaaaagcagacagcgatatgacaaagttaacagatttaaaaggaaaaaatattgcgacgttgagtcctaattctgccagcggttatatttatccagtagcggagttaaaggatgccggagttgatccaacagcggatgcgaaaatgaccacggtgaatgatattccaagtgaaattactgctgttttaaatggtcaaatggatgcagcattcgtctttgaaggtgcgcgtaatgtctttgcttcaaaattttctgataatgacctgatgaaggatttgaaagtattgtatttaacagaaggggatatccctaatgatgcaattgctgttcagcctgatatggacaaagaattgaaagcaaaaatcaaaaaagttttcttaggcatgaaagacgataaagaaggaaaagaagcgatggccttatggagtcaccaaggctacgaaaaagctgccgattcagcctatgatacgattcgagaatatactaaaaaagctgcagaataaaacacgagcgattgtcgaccaatgtgtcggcgatcgcttaaaaatggagaacgagcatgattatttttgagaatgtttcaaaggtttatcccaatggagtggtgggcctaaaggatatcaatttgactattgaagatggggaatttgtctcgatcattggactaagtggtgcaggtaaaagtacgctattgcgagccatcaatcgattggttccaattacagatggcaacattcaaattaacggtacatccataactaaggccaataagcgtgagctgcgactgattcgccgtcagattggattgatttcccaaagttttaatctggtgaagcgcagtactgttcagaaaaatgttctatcgggccgactaggctactattccacctggaagagtatctttgggctgtttacgcaggaagattatcaacgaaccaaagaagccttggaaacagtaggcttatctgacaagttgcaaacccgcagtgatgaactgagcggtggtcagcagcagcgggtttcgattgctcgtgcgctcgttcagcaagcaccgattattttagcagatgaaccggtggcttccttagatcctatcaccacccaaaaggtgatggaggatttgaaaaagattaatcaaacaatggctaaaaccgtgattgtcaatcttcattcggtacctttagctcgggagttttctacgcgagtgattgctttaaaagctggacaggtggtttttgatggctcgccggatgctttgaccgacgaacaactgactcaaatttacggcaaagccatttttgaagaaaaggcaggggatcgcgatgaaattgcaagaaactgtccactttaaatggtacaagcacctgttgattctgatagttttagtgctttgttttcaagcgagtgtgggtctgacttcggctgattttgcgatggtgtttgccaactctgggcaaatgacagactttttgtcgcggcttattcatccggattttagttatttgtcgaagctggtcactccaatggttaaaacgctgcaaatgtcgttagtcggaacggtgattggtgtggcttttgcgattcctatcagctttctggcaacgacggtcgtgacagaaaaccgctggctatccactatttttcggtttttgttgggcttggttcggacaattcctaacctgctattagccgctctttttgtcgctatttttggcataggagaagctactggggtgctgacgattgctgtttttacctttggaatgatttctcagttgatgtttcaagcaattgaaacaattgactatggtccaatcgaagcggcggctgcagtaggagctaccaagttgcaaattgctttctggtcaattgctcctcaagtgttgagtcaatttgtcagctatatgttttatgcgtttgaagtgaatgtacgggcttcaacagtgctgggttatgttggtgctggcgggattggcgttattttgaattcctcactggctttattaaattatgaacgggtatcaataattattttaacgattttagtcacggtggccttggtagataaactaagtgaacgtgtgaggaggtcactgttatgatgattcgcgacatgagtagacgaacattgctctttcttacagttgtggcgctgctggtgatttggtcagccttcagtttggattattcaggtttaagtactttttctctttcgatgggaatggatgtatttaaaggactggcgcagccagattgggcatttctttatgatggcagtggagaggatttagtaagtttgctgctgttgacgattggcattgcttttttaggaacgatgattgcgacaattttggcgattccgttaaccttgctgagtgctgttaatctctggaaggcacatccgttagttacaaaaattgggaagttcgtctgcaatgtattgcgagcctttccagaattagtttttgcgattatttttgtgaaagttgtcggtccaggtccatttgctggagtgatggcgattggtgttcatcaaatcggtatgttagggaagctgtttaccgaggaaatggaagcgatggatgaacgcttaaccgaagagatggaagcggttggagctaatttttggcaaacgattttctttgttcgagtgccttatttgttgccaatttacagctcattggcattgaatcattttgaaattgctgttagaagtgcagctacactaggattagtaggtgctggcgggatcggggcaccattgatttttgcgatccaaacacggtcatggagcaaggtcagtattattttaatcggggttgttattaccgtatttattttggaccaaataaccggaattataagaaagaaattgagatagcacatgaatatattgcatatatcagacatacattttcgcagagaatatgaaacaagcgaaggcggctataaaggcatgttagccaagatgcaaagtccgcttattccgttggagaagtatctgcatcagctgcaacaacggacaacacttgatttggtaatcatcagcggtgatctgactgaagatggcgaggtagaagattatcgctatctgaagaactggctgcaggaagctttgggcgaaacagagatgattgtcacacttggtaaccatgatattaaggagaacttttgggctggctggtttggagaaaaggcttctgaaaaaccttacaatcaggttgtgatgtatccagaatttacggtcatctcctttgataattccagctatggctatgcagatggaattgtagatgagcagcagcttcagtggctagcggaggtgctggaagaatataaagagcaaccgattatattggtaacccaccaccatttactgtcacagcaaagcaatatgccaaaatggcctggcacagaacgctttttagcgttaattgaaccatatgatattcgttgtattttaaacggacacacgcatcacttctttatggatgaaatcaatggtattccttattttactgtggctagtatgtcctttgtcggagaaaatgtaggcgacggcttggtccgctttgaagaacgctacggctataatctttattgtgtggagcagggaagaatcacccatcaaacgacagaaaattttatttcagggcatgtgttgaagactctggacatgcgttaataaactaataaaagtactgaagagaccgaactgctttttgtgcttcggtctttttcgtctaatcaatgaaggagcgatacgattgaagataacctttctcgaaaccagtgacatgcatggctatgtttacccaactgattatgctggaaaacacgatctagcccttggtgcggctaaagtcgcaacaaaattaaagaaattacgggaaaaagctgaaggtgttgttgtgacgattgaaaatggcgactttattcagggctcaccgttaagttattatattgctcaaggaaagtattcggttggtacgttaaccaaagcaattaatcaaatgaactatgacgttcaagttattggcaatcatgagttcaactatggcttggagtatttacaagcagctatcgacagctatcaagcacctgttctggcagcgaacatcttgaatgaagcaggagacccctactttggaaaagcctatacgattattgaaaaagcaggattaaaaattgctgttcttggactggttacacaatatattccacattgggaaaagcccgtcactcttaaaggcattacatttgaaagcattgttgagactgctaaaaaatatataccaatcttaaggcagcaagcagatgtcgtagtggtcagttatcatggcggcttcgaaaggaacttaatgacaggagaaccaactgaggctctgactggcgagaatgaaggctatcagttgctgcaggaggtttcagggattgatgcgctgtttactggacatcagcatcgggtaattgctgacattgtcaatggtgtgcctgttgttcagccagggtatcgtggaaatcacatcggagaaatccagctgacagttgagaaaatagaaggaaaagtagtagtgacagatagccaagccggggtgcattctttagaagatgtggctgctgatccgaaaattcttgcagccgttgaaacggcagaaacggatttagacgattggctggaccgaacattgggacgagttaaaggtgacatggcgattaacgatccgatggaagcgcgtttagtggagcatccctatgtagaatttattaatcgcgtgcaaatgaaagctagtaaggcaaaaatttctggaacggctctgttcaataacgaaggaacaggatttggttcaacgatcactatgcgggacgtcatcacaaactatatctatcctaatacactagctgtgatcaaagtcagcggagtcgacttgcgtgcggcattagagcaatctgcgagttatctggcggttgaaaaggggaaggttgttttcaatcctgcctttatcaaacctaagccgcaatactacaattatgatatgtatgaagggatcgactatactattgacatgaatcaacctgttggccaacgaatcactcacctgaccttccaaaatcaagcaatcctgccagagcaagaactggaaatagtcaccaatcattaccgagcaattggtggaggaaattatgagatgttcggagcggagaaaatcgtgcgagaaattcaggtagatatgacagaattaattgcggattacttgaagcagcatccaataattcaagcaaagacgaaccaaaactttcaggtggttttgtagatgaaaagataaacagaggttgtgatagaagtggtcagcttcaagaaataagaaggaatttccgaaaattgtttctcaaatttttgtgaaatttcggcttatttccgaatgctagttctgcttagtgaaacttagcagtaactgtatgcggagcttgcgtagaagaagctacttctggaacaccgtttattcgggaaaagaagctatgacaagtcttttgtcacagctccatgtttatctattttcttgccacagagtccgtcaaaatcaattcagtgggtacgatgaccctttttggtaaatctttctctccgttaatcagcttgaaaagtagctctgttgcttttgtacccaaaatatttgtaggaacattgattcctgaaagacgaggggtgaaaaaggcagagtaggactcatcattaaatgcaatcaaagaaaagttatcagggattttatacccttctttttcaataatttgaaagagactaagagcttttagagcatctgttgcaaagatagcagtaggtaattgtttaccactaaataattttttagccgcctgaatagattcctctagcacatagcccccatcgacaatccattcattttttatatctagataattatcaaataaagctttacgatagccatttactcggtctgctgatacatgaatattcagaggagcatgcagacaggctatttccttatgtcccagatcaatcaaagtttgaatcatttggtaactatcactatagttgtctgtatccaccgaataaatatattcatattccttttccagttttccaataattacgattggaatttttagcgcatcaagttcctctagatattgttcatcttgagaagcacttaagatgattatcccccgtatcaatttttcattgagtttatttcttattttttgcgcttcttcctgattgtttttagatgtttgcaaaatcaaatcaaaatcatttttctctgatacagctgaaatagactggataacatcagaaaagaaaggattgccgcttgttgaacgaaccgatcgatgtgaaagagccaatattgcatcaaatccgttaccagtaagaccacgtgctaacttactcggcatataattcaattctttaattgctgctaaaactttttctttggcctctggtgaaatattatcttgattgttcaatacacgagaaactgtggatttagagactccagatttgttcgcaatatcataaattgttggtttcaaaaaaagtcctcctaacgctggtagcggtaccatcacagctagaatattactggattatcgatgatttgtccataaaggtggttaattatttaaaaaaacaattgacagaaaccgcttactataatattatcttggtgtgaggtgggagcgctcccacaagaaaggagttttctatttgatcgaagaaatcatttctgcaatttatccgcatcaagatgaagcaatgtttctaaaagaagcaatatctgaaagaatcaagggatataaaaataagaatatccgacctagaaaaggacaatgggatcaagatgatgtgtttttgattacttatggcgatcagttttatgaggatggagaaactaaattaaccaccttcaataaaatgtatcagcagtttttttcagatacatttccaattgtacatttcctaccgttttttccttacagctcagatgatggattttcggtgattgattatgaacaggtaaatcccgaaatcggtgattgggcagatgttcaggtaatgaatcgtaatgctcgtttgatgttcgatttcgtttgcaatcatatgtctgcaaaaagtaattggtttcaaggttacttgaataatcgcactagctataaggaattttttatcgaaagtgatccttcgattgatctaagtatggttacaagaccgagaacgtcaccgttgttatcagagtttgtcgatttagatgggaagatacgcaatatttggacgacttttagtgatgatcaggtagatttgaattttgctaatccgaaggtcttattaagaatgattgatgtgctgctgttttatgtagatcaaggagcagattttattcgtctagatgcagtaggatttttatggaagaaagctggaaccagcagtatccatcttccagaaacccacaagatcattcagctttttagaagcattgtggaagaggtagctccaggaacgattttgattacagagacgaacgtgcctcatcaagataatatcagttactttggggacgggactaatgaagcgcaaatggtttatcaatttccgttacctccattagtattgcatgcgattcgaacagggaatactagctatttgcaaaaatgggcaaatgaaatctatctaccaacggaaggagtatccttcttcaattttttagcatctcatgatggaattggtctaaatccgattcgaggaattattgatgaaacagaaattcttgatttagttgctagtatagaaaaagagggagcactagtaaattataaacaaaatccagatggttctttcagtccttacgagattaatacaacctatattgacgctttaagtaaccaatcagatgaagatgagctgcgtctgaagcgtttcatggtggctcactctattttattgacgattattgggataccggcagtttatgtgcaaagtattttaggcggacgcaactactatgaaggtgttgaaaagacaggcgcgaatcgaacaattaatcgccagaaatataaagcttcagaaatttgtgacagcttactgaaaagtgggtcatttagaaaccaagtataccgtgaacttcaagagctgattcaactgcggagaagtgaggaagctttccatcctaattgtgctatgcgagttctggaaacgaatcatgcaacatttggaattgttagagatgaaaaggtttacgtattgcataatatgagcgatcaagcccaaacgatttcacttgatgctggaacctatattaatttattaacaaaaaaagaatgcgatatccaacaggaagtaattttggaaccttaccaatttgtttggttggaaaaaatttagaactatcaagaaggagacagtggaatgaaagcaaagaaaatgatttttggtacggcattggcagtgttggctctgactttgggagcatgtggaggaggaagtgcgaaggatgatgagaaaacgacaattgagttcatgcattcttctgttgaacaagatcgactgaaagtaattgataagctggttgccgattttgaaaaagaaaatcctgatattaaagtgaaacaaatgcccgttgaagaagatgcgtataacacaaaagttgttacgttggcccgttcaaataagcttcccggtgttattgaggttagccaagacttcgcgaaggtaatggataaggatgaactgattgatcaaaaagctgttggcagtgtcatgaaaaatgttggtgaagacaattattacgatggcgccaaaaaattggttcgtacagaagatggttcaggatatattgcagcaccgataagcggttgggttcaaggtatttggtataacaaaaagacgctgagcgatgctggattctcagaaccaacaacttgggactcagttttagagatcgcgaagcattttaatgatgcaggcaataagaaatatggcattgcaatgccgaccgccgacagtacaatgactgagcaagccttttcacagtttgcactttcgaataatgcaaatgtgctggatgataaaggaaaagtgacgattaatacgccggaaatgaagcaggctttagaatattataaagaattatcgcaatacaccatgccaggttcaaatgacgtaacggagattaaagatgctttcatgaatggttcaaccccaatggcgatttattcaacgtacattttgccgtctgtttttgaagaaggaaagtcagaagatattggttttgcgattccaaccaacaaacaagaggccgtttatggaacagtttcgggattaacgatttctgctggattagataaagaacaaaaagcagcttctgaaaaatttgttgagtacttatcagaagccaaaaatatggaaaaatgggtcttaatgtcacctggcggagcacaaccagtaaacaaaaaagttgtcgatagctcttcttaccaatcaaatgaagtaatcagtgcttttggcgagcttccgaaagaaattgccagctcatttgataaggtccaagtatttggtttagttggcgataaaaactttacaaaaatgggagatattactagctctggtgctatttcaaaagcggtaaatggcgtaactgttggtaaggaagatcctgagaaagcattaaaaacggctcaagaatcaattgaggagtaggagcgggttatgaaaaatatagcaaacaaaacagatacaaaatttgctattgccttattagcaccaagcatgattttattggcagtattggttttctttccaatgctgtcaaatatccaaattagttttttagatttgccgttgaatgcgaatctaaagtctacttttgttggattgaacaattatctagatattttaaaggacccagctttttataaatcattaggtttgacgatcgcttatacagcgttagtcgttttgggaagcaccgctttaggcttagcagtggcgattgcgtttaaccgtgaatttaaataccgcggattggttcgttctttgattattctgagctatgtcacaccttctatttctttaatttttgcttggaaatatatgttcaataatggctatggtattatcaataattttttagtcgataaattacatcttttcagcgaagcaccattatggtttgataatccaggttcaagttttgctttagtcgtaatctttgcaatctggcgctactatccttatgccttcatctctttattggcaattttgcaaacggtcgataaaagcttgtatgaagcggcggatatcgatggcgcaaatttctggcagaaattcaagatcgttacattgcctgcgatcaagccggtcctcgccacagttattgttttgcgatctatttggatgttttatatgtttactgatgtctatttactgacaaataaagtggatatattaggtgtctatctttataaaacagcctttgccttcaatgacttaggtaaagcttcggctatttcagtgattttattcgttattattgctgtcgtgattctaatttcaagaaagcgggtggatctaaacaatggctaaaaataaaaaagtcaaaaaaatcttcttttatgccatggttatttgctttttagcaattaacctgttccctttttggatcatgctaatgacatcttttaaaggcagcagtgaagcgatttcgactacgccgagtattttaccgcgtcaattcacgacagaacattttgtcgatatttttaatccagagatttttccatttgtcgactattttaagaatagctttgttatttcgttgtttgcatctgttatcgctgtgattattggaattggtggcgcttatgcattagcacgtctaaactttaagggacgtaataaaatcaatgcgagtttctatacggtgtatatgttctcaggtattttgattgtcgttccgctattcaaaattatctcttcattgggtttgtatgacactagaacttctttagtcataacaatggtggttcaaacattaccgacagcaatttttatgttgcgcagttactttgaaacaatccctaaagatattgaagaggcggcgatgatcgacggtttgagccgttttcagatcatcattcaaatcatgatacctctagcattttcggggattatttcagtttttgtgtattgttttatggtttcttggaatgattttctgtttgcatcgatcttcctttcatcaaccgataagtttacattgccaatcggactgaacacgttatttagtaccccagactatgtttggggcaggatgatggcagcttcactgattactgctttaccagtagtcatcatgtactcactttcagaacgttttattaaaggcggagccattgaaggcggcgtcaaaggataatttaaaaaaagaggatgaaaatcgtgaaaaaattagtagcacttgaaccacgggtagcaggtttaaaagagtatgaagaaagaactattttagaagacgaagtactgattaaggtgaagtttgcttctcctaagcctggaacagaagtcgttgattttagagggatcagtccatttatcgatgatgagttttcttcagaatggaatatgtttatgccacgtgaggcaggaagccctcgcggtattgagttcggcgatctgccattaggaaatatggtggttggagaagtagtggaaataggcagtgaggttaccgaatatcaaatcggagagattgtttgtacttatggccccattcgagaaacagtggtcgccaaaggtgtagacaactataaactacggaaaatggcaagcttggatagttggaaaaatgcagtatgttacgatccagcacaatttgcgatgggtggtacccgcgtagccaatgtacgcgctggtgattttgttgcaatttttggtcttggcgcgattggtttaatcgcagtacaaattgcagttaatgctggtgcaaaggtcatcgccattgatccaatcaaagaacgtcgaacattagcggaaaaatttggtgcgattcatagtctagatccaataactgaagatgtcggtttaaaaatgaaggagtttaccaacaaaataggggtcgattctgtcattgaaaccagtggggctgctagtgctttacaagcttccttgagaggcattgcttatggcggaattatttcctatgttgcttttgctaaaccattcccagaaggattaaattttggtcgtgaagcccattttaataatgcgaagattatttttgctcgggcttcaagtgagccgaatcccgaatatccgcgttggaatcgcaaacgaattgaagatacttgctgggaactgctaatgagcggttacttagattgttcagagattgttgcaccaattgttccgttagctgaaagtgcggaagcctatatgcgctacattgaccaagacccttcattaagcgtgaaaatgggtgtagagctttaaactaaaaggattgaacgaagacaaataaggagattatatcatgagatttggcacgcaagatcaagcatttttcccaacagacataaaagaaaaatttcaatttatcaaagagttagggtttgaaacctacgaaatagatggcaatctgttagtcgaacacgtagaagaagtcaaggaagcaatgaaagaaacggggattttagtagaaactgcctgtaatggttacgatgggtggatcggtgattttattgaagaacgtcgtttacgagggattgaacagatttctgatattttaagagcgttagctgaagtaggcgggaaaggcatcgttgttcctgcggcttggggcatgtttacctatcgtttaccaccgatggtttctccaagaagtcaagctggagattttaaagcagttagtgactctttgattcagttagagaagatagccgctgaaacgggaaccaaaatatatttagagccattgaatcggtatcaagatcatatgatcaacttattagctgatgctcggaaatacattgatgaaaatcaattggtgcatgttgaaattaccgctgatttttaccatatgaatatcgaagaagatagtatttcaaaagcgttgatcgagcaaaaggattatgtgggacacatacatttagcggataatcatcggtatcagccggggtccggagccatcaattttgttgaacatttcaagacaatcaaagagatcaattatgacggttgtttagtatacgagtgccgattacgtggagaagatcttcctaaaatttatcaaaattctatcaacttcttaaaggaatgtatgagaaaagcatagttgaacgctcaactatgcttttcttgaaaggaacgagtaatgaaaaaaatagcgattatcggtgctggccaagtagcagaaaaagtccatgcagcctattatttaacaaaaccagaaacgtttcaattagtagcagtggttgatcctaatttagcaagggccgagcttttttgtcaaagaaatcaatttaagcaggcatacacatcaactacagaaatgttgatagaggaacaaccagatatcgtaagtgtttgtacacccaatcgctttcattatgacagtgtaatgagtgcattagcggcagggtgttcagtattctgcgaaaaaccgccagccatgacgagccttgaagcagaaaatatgtggaagctggcagaaaaaaaatctgtttgtttagcttatgattttcaacatcgttattcaccggaagcgcagatgttgaaggaaaacattgccttattgggggatatatattatagcgaagcaaatgccttaagacgttcaggggttcctggctggggaaattttattgataaaacacttcaaggcggcggtccgctgattgattatggaatacatatgttggatacggcgttatatctattggattttccaaaaatcaaggcagtttcgggttatcaatatcaaaaaatcggtcctcgtaagaaccaaggttcatttggattttgggacccagaaaaatacacagtagaggattccttgtttggaacattagaatttgaaaatggcgggattcttcggatcaatacatctttcgcgttaaatatacaagcggataaggttttagatgttcagctttgcggtgacgaagcaggtgcaaatctctatcctggtaaaatttatacagatcaagctggggaacttaaagttattaaacaaatcgaaagtaaggaaacgaataatcattttaccagtatagatcatttttgtcgtaaagttgctggagatccacaagcaataattgctgatggcagacaaggctatattgttcaaaaagtgattgcagcattatatcaatcggctgaaataggtgaaaaagtagaactatgaaaatagaatttaatcaatttgaggaagaaacactaaataaagaagcaactctaatgacgacgggaaacggctatttaggagttcgtgcagtacatgaggaaaagtatcgaaatcaggatagaggtttttttgtccggggcatttttgatcgaacgatcggtacagaggcagctgaattagtcaatctgcctgatatcactgaacaagagttaagaataaatggcgagattttttccttaaatagtccgcaagtgagagattatcagcgttcgctagatttatcaacaggagaattgaatcgttcattaaaatggcaaacggaacaaggcgattggttcaaaattacaaataaacggattgttagtcaaaaaaataaggaacaaattgcttttcaactgatcgtagagccattgagtggttcagctgaaatttccatcaaaacggggattgatggacaagtttctaacggtggcaaccagcatttaatcgaacgtgatatacgtgtgtatgatgaacgcctattggtagctgaatatgagacgattgagagtcatttgacagtaggtctggctatgcgtctaaataaatcaggaattatttcagcgaaaaatagaaaaattcaaacaaacattcaagagagctgtcagaaaaatgattcattcgtttttgaaaaagtggcttatatatattccagcttagaagctgatgatccattggagtctgctaaaaaggccgcagcccaggaaatatcttatgaaaaaattgcgaaggaaacaaaaaaatcttggcatgatttttggtcagaacatcgggtagtagtcaatagtcaaaatgcctttgaccaattggctttagattttgcatgctatcatctgcaaattatgacccccgatgattcacaattcagtgtggcagcaaaagggttaacaggcgaaggctacaaaggtcatgtattttgggatacagaaatattcatccttccttttttcttgcataatgagcccgatactgcaaaaaaattattgaaatatcgattttttagattggctggagcaaaagaaaaagcgcgacagaataactatcgaggtgctttatttccttgggaaagcgccttaacagggtatgaagagacaccaaaatacgcagcgataaatattcgtactgggaaacggcaaattatatcatcggctgtagcagagcatcatattgttgcggatatcgcttatgctgtgatggatctttatcaagcgacggctgaccaggaatttatggataattatgggaaagaactattaaaggaaacagctcttttttggttgagccgcggtgtcgagataaatggtcggattgaaattcatgatgtgattggtccggatgaatatacggaacacgtcaataacaatgcgtataccaattatttagccgcctataatgtacgatctgctttggagcagcaggtcggtgatgagcagttgcaagaacaatttagacaatttttagacaaactctatttaccagataaaaatactgatggcttaattccacaagacgatacattcttggaaaaaccagtaattgacttatcaaagtataaggaacaggcagggaatcaattaattctgaccgagtattctcgacaagaagtcattgatcggcagattctaaagcaagcagacttagtcatgctgttttatttacagccagatctatttagctttgaaacaatcaaacaaaatctctattattatgaagatcgaacaattcatgattcatcattaagtaaagcgattcacgcgattgttgcagctagaattcatgaagcagagtgggcttatgagatgtttcaagcagcttgtcgaattgatttgaatgatcagccccatacaagcgatgaagggattcacggtgcagcattgggggcggtttggctgacggtaatttttggctttgcaggtattaaaaaaggtgatgtgctagaaattaatccacagcttccgaatgcatggaagcagctcacgttcaacttttattggagaaatgaaaagattactgttcagatgacccaagactctgttttattaaaaaaagaatctaccaagcagctgccaatcatgattgaaggtcagaactatttattagcagataaattagaatggagcagaaggtaatacgatgaaaattttaatgatgccagattctttcaaaggtagtctttctgctaaaaaagcagcaactatcctaggagaaagtttccaacaagtttttccatctgcaacgattgaacttttaccagtaggtgatggtggtgaaggaacattggatgctttatcgcaaactatttcgatggaagaaagatgggagacagttagcggctggaatggtgagccattctccatgcgatacatgcattttcaagatcaagctttttttgaaatggcagatttagttggtttgccgatgttttctgaggaacaacgccgaccgttggatatccttacgattggtcttggagaattaatcattcgtcttcaagaaaaagggatgaagaaaatttatatcggtgttggcggaagtgcaaccgttgatggaggaatcggacttgctgcaggcttaggctatagattttatgacaaagaaggaaatctattgcaaccgaatgggcgaagtttgtcaaaaattgtcagaatagatgacacagatgtacaagaattgacggcagaaatctatgcggtgacagatgtaatgaatgttttatgtggtgcatctggcgctagttttatttttggaccgcagaaaggcctaaaaattgaagagatatcaaaaacggatgaagcattgaaacaagtttatcaattaatcaatcaaacgttaattgatacccccggaagtggtgcaggcggtggtttggctgctggaatcgcagggttcgctaagggcaaaatcattcatggaatcgattttgttttagatgtactagattttgatcagcgagcacaagatgcagatttcattattgttggcgaaggtagaatggatcagcagagtatggcggggaaagctccagtaggaatagctaagcgagctcctgctaaaacaactgtattagcaatcagcggcagcgttgaccaagagttcagtgattatgaagcttatgggattagcgcgtgtttctcgattattggacagcctgaaagtttaagtgaagcattggataatgctgaggtaaacttaagacgaaccagcttatcgattgctagattaataaagaatgtaaggagtaactgtattgactgagtatttaggtgctatttttgatcttgacggtgtgttggttgatactgcaaagtatcactttttagcatggaaaaaactagcagatcaattagacattccatttacagaagaagacaatgaacgcttaaagggtgtttccagaataaagtcgttggatatcctgctatcattaggaaataaaagctattcagaagatgaacgtaacaaatttatggaacaaaaaaataaagagtatgttcgctatattagccagatggatgaacgagaaattttacctggtgtaattgaattgctgaatcagctaaaggatagaaaattaaaaattgctctcggctctgcgagtaaaaattcaggactgattttgaaaaatacaaaattacaggattattttgatgtgattgttgatggtaacgatgtttcaaaagcgaaacctgatccagaagtatttttattgggggctaaaagaataggtattcctgcaagtcagtgcatcgtttttgaagacgcctatgcggggattgaagcggctaaaaaagctggaatgttggctatcggcgtaggaaaccgaaaaagcttagcacatgcagatgtgcatgttgaaaccttagagaatcttgatttatcggtattaaaaagtaagaaggatggggatattaaatgacgcagctcacactaaaacatattcataagaaatatgacaatgcagaaaaatattcagttactgatttcaatttagagattgatgataaagagtttatcgttttcgttggtccttcaggttgtggcaaatcaacgactttgcgaatgatagcaggattggaagagataacagagggtgaactgaaaataggtgatcaagtcatgaacgaagtagcacccaaagatcgggatattgccatggtttttcaaaactatgcgttgtatccgcatatgaccgtttttgacaatatggctttcggtctaaaactaagaaaatatgatcctgctgaaatcaaacaacgagtggaaaatgctgcagacattttaggactgactgaataccttaaaagaaaaccagcagcactttctggcggacaaagacaacgggtagcattaggacgtgcgatcgtcagagatgctcaagtctttttgatggacgaacctttatccaacttagatgccaaattaagagtatccatgcgagctgaaattgctaagctgcatcaacgtttaggaactacaacaatttatgttacccatgaccagacggaagctatgacaatggccgatcgaattgtcatcatgaaagatggcgtgattcaacaggttggaacgccacaacaagtttatgacactccgaaaaatgtctttgttgctggttttattggttcgcctgcaatgaatttctttgaagtaacattaaaggatggcttcataaaagacggttatggtttaagcttgaaaattcctgagggtgaaaagaacacattggttcgcaagggctatgaaggaaaaacacttactttcggtattcgtccagaagatatccatagcgagcagatcgcaattgattcttcagacggagcagttgtgcaagcggaagtgatggtttctgagttattaggtgcagaaacactcttatacactaaagtcggtgaaacggagtttgtttccaaggttgatgcacgtgattttcataaaccaggcgcacaagtagaattagctttcaacttaggaaaagcacatttcttcgacaaggaatcaggagaagtcattaagttactataattaaactaaaggaataggcttagaatagttgtcatagaaatagccaatcgaacgaaccttacttgctagcagttcgttcgattggctattacatttttcgaattttctaagtaattagtaatcgcctactttatttaaaatcaacatgaattaagtcacatgatagatcccatagctgcgatgagacctttgcatttaatgcctgttttgcaggtttgatcagcttaggatagccatatatttccatcattcttgctgaaccataaaagtcaccactttttacttctggggatgtcgctgcaagtaaagaggcgcgggctccttgactaggtgtttgaagggtatgatagattaacctcgtatagagatttttgccaggaccattatccattaaatctgtcgcaacgccaccaggatgaacaccgatgctagaaattccccaatttgaagcaatgctgcgcttatgaagctctaaagcaaacattaaacaagccaattttgattgcgaataagcgacattcggatcgtagttctgttctaattgcaaatcatcaaaatgaatttctccagaacgatgagccatgctgctaaccgttacgacacgagcatttggtgttttgcgaagaagaggaagaagctgagcagttaatgcaaaatgacctagataatttgttccaagctgtagttcgaagtgatcctttgtcactctccgctcaggagttgccataacgcctgcattattgattagaatatccaatttttcaaatgttgattgtataattttcccgaaattttctattgaggctaaatcagccagatcaagtttttgaaaattaattgttgcgtgaggatactcgtttttgattgcttgaacggcttttgctcctttattggcattgcgtccggcgatgatgacgttcgcccctgcgcctgccaaagatattgctgcttcataacccaatcctccggtaccagtaataatgacatttttaccaacctgagagcccagttctttttctgtccatctttttttactatttctattttcattcatacttatcatttcccttccttttgacgttacgattgaaacgtcttggtgattgcagtatagtaatctaaataagatgtttcaagggcaaaagcatgaaacgttacagattgggggatattgtaatggcaaacaagctgaatagttatagaaatgcaatcacaaaagaaagcatcttcattgcactgatgcttttaatgaagacaaaagagtttcataaaatctcaattacagaggtaacgacaaaagcgggcgtctctagaatggccttttataggaattacgaggtattggaagatgttataacggattatttagatactttttttgcgaagtatgaaaagaaagtatctgatatcggattagacaatacctatgacatcgttttaatgttcttttctagttttaaaacagaaaagacgcttatgatgaacttgatagactccaatttgtcttatttgctgcttgataaaagtaattcatttttagaagagatatgcaaagaattcgtctgtgataaattttattctcccgaaaaagaaaaatatacaatcaaattcttatgtggtggtttctttaacatgttagtagagtgggttttaagtgacttcaaagaggatgaagaatatatggcagagttgttttgtgagtattgtaagtgaagggttaacaaaaaaacactcaaaatggattacctgcgatacagcggtccttccatcttgagtgttttgtaatgatctgtctgaatcaatgaaagttctcaataacttcttttatatccatacggattcgcctcatatggataaacttctttccctgatctgttacactggcgagagcaaatctcacgactactttggttaaacattccttcgagcagcaataaactgcgttctcccacttttttcgatcaaacctgatgaagttgtttgcaagattcaagttgttgggatgatagctgtagatataatcccccagttcttcaaggaatgcgtgtttacaaccaggacaaaggtgccattgcccatcctgataattacttggtacgatatgtttttccttgattcgaagtcgtcggatggggtaatggctttttgtaggaaaataatgatttaaatggagtaatcgttcgattgcctgccgttcaaaaaatgagttgtattttggcgcagataagattttagtttggatcattttatcccctcatttctattaattatcaactccacgatcaaaaattacgggtgtcatcattcagaatacatttcgtcatagggttcctttattcaatcgatcttgcagaacctttacacaatcagattctgggctgatcatgccatctgcaattgtccccatcctttgctgcaaggcaaggcaggtgatagggccaaaatttccatctgacgacacacgtaataagatctggagtgcacggatcacatttgatccgccgtaaccaaaccgaacagaaggaatgaactgattggcacggtttacaatctgaccgctgatgatcccgtctttaattgaacagttcaacatttcctgtaggcgtctagtagtcgctggtccccaagaaccatcgattgataagattcgctgctgactgctattttcacatggaccgctaacactggtatttttcacccgaaaatagcgtacaggcaagcctgaataatcacccatccagccgatcgctttcgtcactgcaatgttttgacagcctttggaatacgtacagtgcaaggcgtctccatagatatcttttaagaaccagccagtgtgtcccgctgatcctagtgaggcacctgcatacccagccacccataagtcaccccgacgaacatcattgcgattaatttccttcagtaaagttccatttaatccaaagagtgtctccgtgttgccgataaaagcatttttcggaagaaagccagcagcaatcagcgagcggaatacgaagctggagcaatccatcgaacgttcaccaagtctgtatgacatgaaatagcaaatctttccacgtaaaaccaacccgtattgcaaagctgtttcagtgttaggtaataagtccacctccttattgaacattattttcctgatcatctttatcaggatagtcatcgactttgctttcaaagatctgcagccacttttggagccaagtgatcttcagaccaaagtcatgggcattttccaagatggagccgatttcatagatgatcaataaaaccgtccagatcagtgccacattgacgggtaaggtaataccgacaatcggtgcgatcttatctaatgcagcggcacaaataatcgttgaaaaggtgatgaatttggtaaataggccataaagattaatggaggatgcccatgtatgacttttcagtgctttgccatatcccgttagaaggtccaaaccagtcatagacaaaaagataccaatgattgggacgcttcctccgaatagataatcaagaagggttcctccagctgaaaatacgataagtttcatttaaaatacctgctctttcttcaaatataccccctaggatcgtgatcgtagggggtgctagtccttcctacgcatgattaacaggatttagttgtgaaaaagcttattctcgttgattgctggcagggtcttctttgtttttaccccttcttccgaagatacgctgaaacagtcctttatctttttttgtgttaggattttccgctttggggatacgatttgtatcagactcctgtttttgaccgccgttatcaatagtttccacctgatgatgtttatttgatggtggaagtgcatccttttttacttttattgagacttctgtagtttctagcggttgaacctgcgtcaattgttcataatgacgcccacgtggttggtctaatgctaaattcgagatagacgcaataaaaggtgtccgagaattcattacattgaatggaaggttttcttttgttttttctgatgtatcgctgacttcaaaatagcgttcctctgcacaatttggttcgttggactgtggctcgtcaggcgcgcaatcattttctggatcaaagattagacgttctctatgagttaagacttttgctgtaaccactgaatcaaatagttttacgccatcttgttcaaaaatatctagtgtcgttaatagttcgcaagcttctttgatttctggcgttgacaggttagggtttaaccctttataggtccagttgtgttctttgccgttgctttttccaaatgttactactaaatcctggttcatctttttcgtttcctttctttattttttatttacgtaggtggttatcatgactctgtagtttcttctggtcggacagttgaaatgagtgatcgaacaattgactggaccttctcgccaaagtttcttaatggaaagacttttaagcgtaatcgtttccactcagaatccatgaagtaatcctgaaaataatagaagaaccgcttcatagtacgtgtggctttggtattcatgaaaagatagcgaacaagatcctgcaaaatgtgagcaaactcctgcgcacctaactggcatctcacgcgtaaagctaagatatatttgatcgttaaactactgttttgtgtttcttggtaataatccatgatacgtttttctaacgtttgcggtttaagtgaaaagatctgctgatgcgacaaaagctgctcattcatattttttcctccttttaatagagaagtgcggcagcgctaccgcacttctcaaattcctattacttagaaaataactttctcagttgtttcgacatatttcgcgctttcgaccgagtcgaagagaaccgcgccatctttgtgaaataattttacgtgagtcagacgttgcagcaagcttttgacctctgcgtttgtctttttttgatctggattcaagaagctccaggtatgactctttcctagactgtttttaaaaactgcgacgatttttaccatgttttttcctccttctattatttggtataacgtgattgacttgttaggatcacgccatctagattgctgccttcgggtgaaagctctgttaagatatttcccagttcaagaacgtcttcctcggtgggttcatcgattacattttgaaaagtcattttctttggtttgtcttcgcctgcatcaatttgaacttgtaatttgttgccaattttttggatcatttttcttcctccatttcgataaatgatttttgttccggccggtgactaaaagataatcaatttttcgaaaatatgcgaatcgcaaaataaccgctacccccctcaatttgactcgtttcgaggtaaaaaccccctatttttgcccaaaacaggtcaaattgaggggggtaagtgtcaaattgcgatttgaaatcgatttctatttggtttataataaagagttttactaaaaagagatcgctgatttgaagtaaatactttctatttttctgcgtattttagagtaagaggactttgatagcggttgttttgccatgcgataatgtaggcgagaaaacctgttgtctggaaggcaggaaaaagagatgcaagtgtatttaccaaccaacgatctattattcaaaaaattattaactacggaggattcccagcatattctaaaagtgttcgtcaaagagttattagacttagaattcgggagactgacgcccctgactatatcaaagaagcgaaaaagaagacagatttcttaatattggaagaggaggaaaaggaaatgatcatgaaaatcgataaagccaaagcaatagcagaggcagagttggagtacgctagggatgaaggcatagcaaagggaaagaaaatcggccgagaagaagagcgaaaaaggaatcgggaagaaaaacgaatgcgattctaaacttaatgcaaacctctctctcattgaaagggatataagagacaagcggcatagatattgagacgctgagaaagtggaagtcagagacggaataggctatctagtgttactttagactcgaatgtttaatatttagtctcatcaaataaaaaggcgtggttagaaagactgaaaaaacatgctgatgtccattctagtcatcagcatgttttttcaatatcaactcacagccagtcaatcccatcgatatctcgaggatcatcaatcagctcttcacagtgataaagagaataagttctgttataaagatggttaagctcacctaaagcggttcgaaacttctttaattttgattgagcacgaagagtgtccgcaaatgcagtattgggaaagtacaaataatctagtggcatatatccaggaatgacaaagtgaaaaaagccacggcgcatagtagctaaaataagacaagcaagctctgctctagaaataactcgtcttcgttggacaggaaggatcagatgaagtccgttagtcatttctgcgtagtgctgtccctgacgtttgaaaatagaagagattttatagggattaatccaggtcgtttggtcttttccctctaatgggaacaagcaaaagtaagggcagacccaaggaaatttgtattttccaaagcagcctgtttcttttaaacaaagcgaaagtactcgatactcgggaaaagaatgttttaaagaaaaacggtgaagtgttgctattgcgctgactttactaaaatagatatgatcatctgtaaaaatcaggacacctgttttttggggaattggtataatacagtttatttcatgagccagtgaaggatcaaaagccaatgcatttgccaagtaacgttcccataacggtgaccactgtttgtcatccagatactcaaaattatccataatactcctcctcaaaaacgttagaattattctttgcatgtagaatatataacaaagttgaaaaagtagaaataatactttcacgattttttattaaacagcaaaaaagaagtatttaaagacataattatgttttgtgtagggactcatagatagagtgagtaccgaaaagtaatgccatagaacagccgacccctttcgtggatcggttgttttttcctattatttaggctctggcagaagcttttcttggaattctttatttgttagaaaccgctcaaattccaatgcagctgaggtcagcaatgcatctttctttttcgcgagatagacacagcgggattgcgactcctccaattgtaaaactttgacatcatgaaattctagtaaattattaaagggtaaaatagccaccccgatatcgatggaaacgagtccggccaatgcctgatcctcttctacgcggcaggagattttcaggggcagctgctgcttttcaaagagcttttccatgtagtaggttttatctagggataagatcatggagtattctgatagttcctttagtgaaacagtttcttttgacgcaagaggattactattagcaacgatagctaccaacggctgatctaatatgtggataaactcgatttcaggttcgtccttcaaaaaagagcataaggcaaaatcacaggtctcattctttacattttcaatcagccttggactatttccctgccagaatttaaacttgaaattcctgcgatggctatcactgcggaattgctgtagcagctgtggaataatctctggacctagggtaaagataaagcctagatcaatacttcctgaatacggatcgactaaatcgcgaacagatttcgtcccggcagcaattttttcgagcccctgttggacactttcatagtaaattttcccgatcttggttaaatggatgttccgtccatgatgtctgaataggacaaccccaagctcttcttctatacgtttaatcgtacgactaagcgtcggttgagcgatccctagttcatcggctgtttttccataatgctctaactctgccaaacgacagaaggcttctagatttttgatattcaatcggttcccctccaagatttctttttataattgtatcatttttcacagattgatatataacttttttgttatgaataatgcggagaattgagattgtttctatcatggattcgttttatagcggttttggaaagaaaagcgcttttttatccataactattactgacagttttgttatgtaaacgattaattttatatcttattgtgaaaactaacacaatattggaggtagaaaatgaagaataagtattttttgactgctgtctgcatgtatttgaactatatagtgatcggcgtaagtgtcattatcctttcaatgaatatggatgccttgatgaagcagtttggaacggatagaactggctttggtttagttgtttccggtatcggtatcgggaaatttattgttttatttatctcaggagtgctttctgataagtttggacgaaagccgttcattctcattggtatggtgggttttatcgtttattttatggggattttgctcagtccgaatgtgccgattgcgttgtttttcgctgtgctggcaggaatgtgtaactcctttattgatgcggggacctatcctgcgctgatggaaatttttccgacatcagcaggaacagcgaatctagcaatcaagttcttttcggcagccgggcagtttatcatgccgttcatatttagttttattattcaaaaaaatctgaattacagcctgtccttttatattgtgattggctatcttgttttgaatattgtctttatgtttactcgtggctttcctgcattgtctacccaatctggtgcagcagaaaaagaagtcaaacgaactttttatgaaaaaccgaagatggcaatcgagggagtctgccttattttaatgggcttcacctcgacgacgatttttacagtcgtgcaggtctggatggcgaaagtggctgaggaatatgcgggaatgagtgttgctgccgcatctaaaatgttgacttatttcagcttgggtgtcgttattggtgtcttcgttacgggctatctagtaagagatcgtgttcgcccgatcgttatctgtttgatctatccattgatcacgatggtttgtttgatcgcgttaacgattgctccattaccgctcttgtgttttatcaccgtgatggtgaccggctttaccagcggcatgttgcaattaggattgaccacaatggctgagcttttcccaggaagcaaagggaagatcaccggcatggtctatagtctgaattcgattgccgtattttcagcacctgttattaccggctggctggctaatacgaatacgatgaatacgatggtttataacgcggcggtatctgggttggcctttgttctagcgttaatcgtatttgtcagatataaaaaagtttttggtccagaagcttttatcagtatgaaggaaatcactaatttagcagaagcaagtaaataattcgagttgaggagaatgaatagatgaaaaaagtaagagcagcgattatcggcgcaggatttgcgggaaatttccatacaaatgcctacacaagagtgagtggtgtggacttcaaaatcaaatatgtttatgacgtggttgaagaaaaagcagttgcgttatgtaaaaaatgggacattattgaacaggtcgctaaaacctatgaagaaatccttgaagatccggaaattgatgtgatcgatattatcacaccgccagtgactcatttagagcttgcctatcaagcgttggaggctggaaagcatgtcatttgtgaaaaaccattgactggttatttcggtgaagaggacgaggaagagccgattggtttaactgttccaaaagcaaaaatgtacgagagtcttttaaaggatatcgatgagtgtcgggcaaaatttgaagcctcagatgttttgttcatgtatgcggagaattatgtgtattcaccaaatattttacgctcagctgaaatcattgaagcgaagaaaagcaagattatgtatatgaagggggaagaaagcattcgttcatccacttctccagcttctgctcattggtcattagcaggcggaggttccctgattcgtctaggcagtcatccaatcggcggcatgctgttcttaaaagaacgagaagcgagagcacgtggggaagaaattgggattcaaagtgtaacagcagagaccgcaagattagcgccaaacttgaacgagcatgacaaacgctatttcccagcgaagtcagtcgatacggaagatttcgcgacgatcattattacgtttactgatgggacaaaggctatctctatttctaacgacaatacactgggcggcgtgaaaaactacgtggaagtgtacacgaatgatagcgccttagttaatacgattacacctgcggacaacttatcgacctatttccttgatgaggatggcttagaggatgtctatatctcggaacagctgcaggagaagcttggctggaacaaggtctttgtttcagaagaaaccttaagaggttatttgaaccagttccaagattttgttgatgcggttgcagaaaatcgcgaaccgttgtctggtctggatctagcttatgatacgattaaagtaatctatgcagcgtatttgtcagcagaagaaggccgcagagtcgatttctgatcgatcgattacgatgtattcaaataaataagtggctgacgaggaattgggcaaaataactgattattttgtgccgattccagtcagttcaagaagtgtctgagtaaagggtctggggagtgattcaggcttttaggagtaagggggagaatgatgtcttttataagtggattgattttagtgctgtcatttgtcgggttggtcgtgtattcgattaaagggcacaatttaatgatcggctttattttgatggcgacgttatggacgattgttccaatcatcaatcaactggcaacaggaagcagtgcatcagttgctgtcgatatgctgcaagcggtctatcagcgagcaccggagagttggggtggtgtcttagtcaatatcttttttggggcttggtttggccgagtacttttggatactgagattgcctcgacgatcatccgaaaatccgtcgagcttggaggagataattctgcactcattcttgttttggtaagcttaatcactggaatcatttttacttctctgacaggtgccggtcctgtcatatctattgctgttgtggtgttgccaatattgttttctattggtataccaaaggggatcgccttgttttcttatacgggctcagttgctgcgggaattttcctgaatccaatcaatttcacacaatatcgggctttttttaacacgggggaggctgactatacatactcagattattttccgtttggaattacagcatttgctgtcatgctggtgatcatagcaatattttcactgatctatatgaaacgggaagcgaagttctttaactgggaagcgacagtagcagctccgacagttaaaaacgcgccgaatttagcgttagttacaccatttttaccagtgattggggtgattcttttaagattgccgatgatcctgtgctttattcttagcggcttatttgctttagttgtttgccaggagctgggcgctgattttcgttcgatcagtcggatgttgacaaagcaatatgcggatgcggtcaaggatacagcttcgctggtgggtttctggttatgtcttgccatgttcaatgcggctgcatcctttgctggtccttattttcaagcaatgcttggtggagtcattcctcaatcgacattgttactgtgtctactatttattttcctatcaccgtttacttggtttcgtggaccgatgaatctagttggcagcggggcagcgatccttgctgtcgtcagtcagcaaaacgccgactggtctgttgaatttctttatccgctatttatatcgatcctgatcggtatgggacatttcgatatcactacctcatgggtgtcatggggactagggtatgctcagatcgaaagtaaaagctatatgaaaatggcttttattccaggaatcgttatttgtatcgtattggagctgctgacctatttctggttcggctaagaaggtgaggaagacatggagaaaagaaaaattcgagtaggcatcgacgttggtggtacacataccaaggcagtggcaatcgataatcaaacaaaacaaatcatcggaaaatcttctgtaaaaacgacacatgatgcacaagcgggggttgcagagggcgtcgttgcttcttttctaaaatgtttagaagaacatgatatttcagcagatgaggttgtttttgtcgcacacagtaccacacaggcgaccaatgcacttttggaaggtgatgtggcgaaggtgggagttattgcgacagctggaggcagctttgaagcttttttgacaaaacgtcagaccagcttgaaccgtttggaattgggaactgggcgtgagattcaaatcagcagccgtttcattcataaaaagaagcttagtgaggaaaggattgctcaggcaattgatgagctttgtgcagaaggatgtcaggtgtttgtcacgagcggcgcatttggtgttgatgatttggcttcagagcggcagatcaatgatgtcttgcatgcaaaagggttgaaggtcacgatggcttcggaaatcaccaagctttatggattatctcgcaggacgcggacagcggtcatcaatggatctattttaccgaaaatgttggaaacagctgattctaccgaaacaggcgtgaaggggacaggcgttgatgttcctttgatgatcatgcgaggtgacggcggtgtgatggatgttaaggaaatgaagaagcggccagtattgaccatgctttctgggcccgccgcgagtgtgatgggagccttgatttatttgagagcctcgaacgggatttactttgaagttggtggaacttcgaccaatatcggtgtgatcaaggatggtcgtccagtgattgattattctcagattaatggacgcagtacctacatcagttcgctggatgtgcgagtgttgggcgttgctggaggcagtatggttcgtgctggacagcataagctgattgacgtgggtccacgcagtgctcatatcggagggatggactatgccgtgtttactccagaggaagaaattattgatccgcagctagaattctttgcaccgagggcaggagattccgctgattatgtggcgattcgactgagaaatggcaagcgcgtaacattgacaaatacctgcgcggcaaatgtgcttggtttagtgaaaaaggagcatttttcttacggaaatgtaaaagcagctcgcaaggcgatggctccattagctgagtatttaaacttgagtattgaggagactgctacggctattctcgaaaaggcttttgagaaaatcgaaccagtaatcatgggacttgctcgtaagtacaaactggagaaggaacaattgtcgttagtgggtgttggcggcggtgcctcctctttattaagctactgtgcggaaaagatggaactgaactatagcatccctgaaaatgcagaggtgatctcttcgattggcgttgcgctctcgatggtacaggatgtggttgaacgaattatccctaatccgtcgaagcaggagattcaacaaattcgcaacgaagcgttgaataaggccatcgaaagtggtgccgttaaggaaactgtcgaggtgcatatcaatattgattctcaaacacagaaggtcacagcgatggcaaccggctctaccgaggtacagacctgtgatttatcgaagcagtgtaccctggaggaagcgcgcgacattgctgaaaatgattttagaagaacagaggaaagtgtcgagttattagcggaaaatagacatttttatatttttgggaaaaaggaagctactggaaatgctatccgggtgatcgacaataaaggctttattaaggtgcaacgtgggaatgctcaaatcatcaagacctctattcaaaattacctagaagccttacgcaccttatgggaggatatggcgaattataaatcagacttgatcgttcgaccggatttttatatttgtgccggtgctagattgatggattttgcgacacaggatttttcacagctgatgatgctggtggatttggacatggcgagtattcagacagacgaggagttgttgatcattgcatgtaatcagcagtattgatgccataaagctgaaaaaagatgatcggtttttagcatacctggaattgcgtaaggataccttttttcataaaatccctacagaaaagatccgctactatattgatggtgcgcttgcatatgggaagcagctggctgtaacagctgattttgtagatccaagcgaactgtgcgaccgcttaggtgtcatggtaataaaggagataactggcaagacagagacagttcgcgggaccttggagcttgctaaaaacaagaagaccattcgaatgtatcagcagccattgaggcagatagctcatgaccataacataacgttggcgcagctagaggaagcagttttgctgcatgagttgtttcatctgttagaagaacagactcgatctacgacagagcaattggaacgagtcgaaacgatgcagtttttaggctttaaaagaacggcagcagtgcgacagacacgagaaatagcggctcatgcctttgttaaggaacgaatgcagcttcccttcctgccgaattactgggattattcgtgggatgtggaggatacacgtgagagcttgttagcgatagaagaatttcgctctgttatggagaagtcagttgcaggtttggaatagaaagagagtgaaggagagatcgtatgaacgagaaatataaaaaaatttttgagccgctgacaatcaagcggatgacagtgaaaaacagagtcgtgatgccgccgatgggcacaaattttgcgaatatggatggtaccttctgtattcctcatttagcgtattatgaacaacgagctaagggtggtgtcggactaattactctagaaaatgcctgcatcgattatccgatgggcacgaatggcgcccgtcagttgcggatggacaacgaccagtatatttctggcttgtggaactttaatgaacggatgcatgcttatggcgcggcgacttctgtacagcttaatcatgctggtgcttctgcttatggcctgcgtttggaaggaaatcagccagtttcggcttcgaatgttcctagtaaaaagggtaatccagtaccgcgtcctctgactacagaagaagtttatgccattatcgataagtatgctgaagcggcagatcgtgcacagcgttcaggctttgactgtgttgaaatccatgcagggcattcctatttgcttagtcaattcctatcgccgatttacaataagcgtacggatgagtttggcggttctcctgaaaatcgtgcccggctgacttgtttggttctggatgcggtgcggaaacgtgtcggaccgcaatttccgattgctttgcgtttcagtgcggatgaactgttaccgggaggcaattctgttcaagataccttggagatattggattattttgtggataaagttgatatcttgaatgtgtcagcggctttgaatgacagcctgcaataccaaattgataagatgaatctggcagacggttggcggagctttatggcgaaggaagttaaagagcgttatccagagaaggtggtcatgacttcaggaaatattcgtgacccgaaacaagcaacggcaattcttgaaaaaggggaagctgatctattggcgatgggtcgtggattgattgcagaaccaaattgggtcaataaggtggcttcaggtaaggaaggattactaagaaagtgtatatcctgtaatatcggctgtgccgaccatcgtatcgtcaaagcacgacctattcgctgtacggtaaatccagatttacattatgaggatcaatacaagctgcggccagtaaaaaatccaactaaaatggtagtgattggcggcggaacagcaggattggaagctgctgcaacggcagccgaagttggtgttatggttgagctgtttgaagcaaaggattacttaggcggactggggcaggagatttctcgcttaccggataaaaaaagaatcaatgattttatcagctatcaaatcaatcgttgtcaagaattgccgaatctgaaaattcacaagaatcgaccattcaatccagcggctctggaatctattaagccggatattattgttaacgccactggagcaaaaccattgctacctccaatcaatggcttacatgaagagctggcaaaagcggatcgcaaagtgttttcaatttttgatctcctgaatggaatggataattttcaagagttcaagggtaaggaaattgtcgtgattggtggcggggcagttggactggatgttgtggaatattatgcagaacgcggtgccgcgaaggtcagtatcgttgaaatgcaacgagaattaggaaaagatctggatctgatcacgaagctggcaatgatggaaattgttgaaaagtataaggtaaatgtttatacttctacaaaactaacacaggttaacaagtctgactttctggttgaagatgagaacggttgtatgataaatttgaattttgatttgggttttatctgtcttggaatgcgtgctgatgcaccgttgctgccagaattacaggcgtatgcactagcagagtaaacataggagatagtaaggtcgcacgaagaatcatcgaaggaactcgagaagccagagatatcttaaagacgattgaacttctggaggataagagaacaaaacaaacgttgttgcaacagcagaccgtaacggctgtttatcagtaggatagaatgaatgttgagattaggagagatgtgaatgaaaactgtaacgattgatacggtcacattaggtgaaggaaaaccgaaaatcattgtacctctagtaggtagaacaaaagaagaaatcattcaggaagcagaatttgttgcgacggtcgattgcgatatcgttgagtggcggattgatttctatgaggacatcttggatttttccgctgcggctcaattttcaaagcaggttaagaaaattttgaataagccgttattagtaacatttagaacaaagcaagagggcggtgagctggctctttcggatgagaagtattttgagatgtatcgtgtattattaaatgaaggcagctttgacctattggatgtggaattattcatgccagcggtaggtgtaggccaaacaattgaactagctcatgaaaaaaataaaaaaatcattatgtgcaaccatgacttcgataagacaccagcaaaagaagtaataattgagcgtctatgcaaaatgcaggagctgggtgcagatatctgtaagatcgcagtgatgccgcaaacaactgccgatgtgatcaccctgctggatgcgacacaggaaatgtatcataaacatgctgaccgtccgctaattaccatgtctatgggaagtttaggagtagtcagtcgcgtatccggtgcaacgtttggctcatcagcaacattcggcgcagcgaaaaaggcctcagctccagggcaggtatctgttgatgagctacgttcgattttggaagtgttataaaagaaatcgatgatggaaatcgcgagtaaactagtagaaagcgagattgctcctttttctaactctttttcttatagaaggttttactgttaactatcaaaaatactgcaaataaacacggagctgatctgaaagtcttttagtctttcggatcagctcctatttacgagtaaatggcggcatatcagtagcgactagggaaataagccataaaaatttgagaagcgccgaccaggaccatccgacatcagttcctatgtcactgattttcttggcaagtttcggaatttccttcttattcttgaaattgacgggcctcttgaaatgagcaacaaagtgctacagcgcacttgcatgcctcatcaactcaggataatattcgaattcttcaaatagcttcggatcgtaatctacaaagcgtttgacccaattttttgcttcaaagaaatcaagtagcacttgatcggcaggctggtagggaatattcaagaaagcggtcaattggctaagatctgtttccagcataaagacatttctcggatcgtaaagtcggtaaaaaggcaacatctcattggcggtaattagcttcttttgtaggaaaagtgattcaaaggttcgaagagtgaccccatattgtccagcacgtaggatttccagaataccgttactacgcttgaccaattttagatattcactatagggtaggtaaccggcttgttcattaccgcgattaggcagaatatgatagaaggtagaaaggcctagtgattcgaagcgattcttaagctccattgcttgctgctttcggccattatcattggcaccaaaaaagatatcataatccgtttcattaagcggctcgccaacagactgagtgtaaaaggaactattatgcttcaagcctagatctcgtgcctctaatggatcgaaatgataaatttcattgatcgcaggttctttttgtgaggcattcaatttgcgataatgctccaatttgaagtgattccagaaaaatagaacaatcttagcttttgtgaaaggatgaatcttggcggccatttctggttcaaaaccgtaatctaaaaatataattagttgaaagtctttcaagtattggcgtaaatattcgttatttgctgcaagtaactctttccccgagcaaacactcatctcagagatggcggggaaaaagtacagtgagcggtctttagggacaattaaaacgtcagattttttcatttttctcccagctttcttattaaatttttctcatcatagcgctttatataacgttttacgatttttatgcttgggaaatataacacaaaaatagagactgtctatgggataagacagtctctaaaggattatatgctgtgaattgtataactactttcacataaacgtaatcatttgtaaagaattagtgtgcacgattgaatcgagcaatccattgtttatagggtaatacgccacctaagaaataggtaataaccgcttgaataggaatccaaattgctgttttgattaagcgtggtgcccagattaaccagctattcaatgggacatgatacatcatggctaaccataaaggtgttaatatcaggttaatcacgatcgttgttaccagcactgactgaatcgagtttttccaagtaatctctttcttgtagaaaaagtatccatagatggctccttctagaaaggcgttgatggtaaaaccgatgaaaaagggtgcttttgcaaatagcgacattcctacaaaatcagcgattacagaaccaatgcctgtccaaaatggaccaaagagcattcccataataatctctgggatgaaggtaaagctgaccttaagaaattgcgtctcgattcctaatattcgagacagggtgaccatcatggcaatcagtagtgccatagttgtgatgcttctagcatcaaggtgttttttcatttctagcatctccttatagagctgctacatctgcatgcagcgaatgcgaaaataaaaccgcagacaaagtctttcgtccagaggacaacatcccatccctccagcacttaacgctttattttctactctgatttatttggggaagtccccgcaaaaatactagcacagatttgagaaggaaacaatcttttcatttcatcgggaaaagaattctagatctttttttttataaataatcttgggtaaaattctgcttcatttagaggtatcattatagagtaaaaaattctaagcgaaagtgagagaagagaatggcagtgaaagctttaaatgaacgtcagttgtttagaatgaagcgtgtgaatcttgaaaaaagaatccagcaatactattctaagacacaagattcagaatcagtgatcgaatatggtatggcgattttagtttttaatgcgattacgatgaccaattattcctttgtctgcaaagatttaatccaggaaattttcttaacaaaagaaccaacagataaaatgcgtgagttttgtctatatttttatgatttctttgattataatgagtgggaaaatgtgcgggatcgattgttcaaaagtcgcgccgaattctccgagaggacacgaaggattagacctgaaacgaagtatgttcgagcagcatctgcccctacaaataaaaaacgggattggctttatgagaactactgggttgacgatgaaaaaaatcgtcctgagaaggagcgatatggttatgagtaccatacggttttcagagacgaacatggtaaaaaacacaagctaaaatttcaaaatgcagatatcagtataccgagaaagaaactcttggtgctgttagaaatattgacaaagctgacaatctttgaagaaaatggtgttcgcaagtttgctgaagtggtatttcctgaatgccgcggtacaagaaagactacttactatgtggatgaagctgacgatgcggcttttcttcaacgtatgcgtcatgagatcgaaaaattgtagtattttgtaaacagaaaggggaatgaacgtgcagccgttacaggaacgacaattgtttcaaatgaaaagagaatctttagaaacgagaattcgtcagtactacgaagaaacgcaaaatgcagatgtggtgattgagtatggaatggcgcttctggtgcgcaatgcgatgatgatggaggattattccctcatgtgtaaggatttgattcgccagatttttttaacctgtaggccaagtgaaagaatgcgtgaattttgtctatatttttacgattactttgaatacgaggaatgggagattgtacgaagtcgtttatttaagagtcgagcggaattttctgagatgacgcgtttggttcgtccggatatgaagtattttcgcgttgcctcaactcctacatttgataaatttgacgaagtattggcctatgcgataaaaagttggtctgaaaaatcccgtgagaaggcatttgaggaaaaggaggatttttatttttccttcaaagcagtttttgaagatgacaatggcaagaagcacaagctgacctttagcaaaaatgcggacatctgcaagtcgtgcgaggaactttttacattgatggaaattttaacgagattaacgatttttcaaaagaacggggttcgccgttttcgagacatcgttgagactgagtgtgaatcaatcgttagccaagagattatcaatcattcgaagcggaagaagaggggacaggaattaagaaaaagcttgattaaatagtatgtacaaagaaaataaaggcagcaggaagctgtgacaaaagtcttgtcgtagcttcctgctgccttttcgtttgttgcaaaaaaattgttttaccaaatactaactcgtttttcaggagccaagtacatcgcatcgttaggctggatatcgaaggtttggtagaagtctgccagatttttcacttggacattggctcgcaatttgtttggcgcatggacatcaatcgataggagtaattgggtatattcctttcgagccttcatccgccaaatcgttgcccagttgatgaagaagccttcaagatccacattattgtctttctttgcggcttctaaagcacagcttagaccacctgcatcagcaatgttttctgagactgtcagcttaccgttgacttttccgccagcgatttctagaccgtcgaactcagcgatcatttgatccgctaacgcttggaaatgcttttgatcttcttcggtccaccaattgtttagatttccatactcatcaaagagtgaaccattgttatcaaaggcatgggagatttcatgggcgatcacagccccgataccgccaaagttctcactgctggattgtttcaagctgtaaaatggcgcctgcaaaatcgcagctgggaagacgatgatattgcggaatggatgataataagcattgaccgtatctgcgctcatttcccattcatcacgttcgactggctggttccattttttgaaatcctctttacgtttcaaatgactgaagtgcaaggcattacttaacagtgttccgccttcttctgctgtcgttactttgaaatgcgtataaattgctgggattttttctggataacctacatgaatccctagagtattcaatttaatgatggccttctcacgagttgcttcactgagccaggtgttgctgctcaagcgatcttgataaatgcctaccatgcgttggaccatttgttcaacatctctcttggcttgttcaccgaagtatttctttccataataatcgccaataatttgatcaaaacgacctgatgctagatagaaggcggctttttcctgtggacgagcttcgggcgcaccagaaagcgcacgactgtatatgccgccgacttgacgaaattcttcgctgagataggcggttaatgcattaagagtcatgaccagcatccagcttttcatttgctggaaggtttttgtattgactaactcatcaagtttttcgaaaaatgccggctcggtcacaataatcttttctggaacttcgccgattaagccgattaataagtttttcaaatcaaggtgttggctatgctggataaatttttcgccgctttcagggttatacattttgctgtagtcggcattttcttcagcactttttacgtgaggcgccaacaatttatcgtattgaagagcttcgtccgtgattttttcggctacagcagcatcataaccagccaagtcgaataatttcagcgtcatttccttaaagatcgccaaaagctgcggcgcttgcggatgatctgcttcgtaataggttttatctggtaggatcaagctaggcgcaccagcaaataaagcattgatcttagtatttttcatatcagcgtctacatctacgccaaagggtaaaggcagtccatcaagaacccagttagttaattgctctgctaagtcattcaaatcttttaacgcttctacttgtcgaagtaggggcagcataggtgccgcaccgtcctgatcgcgtttttgataatcattggctagattgaaataagcgatgtattccttcattaaatcattgggaatcaaggaaggattctcgctcattttctttgtatcagtgattaatagatcatcgatgccatccacaagatcctgaaaaccgcccgttgccggtttgtctgcggggattgtcgctttttcaatccattcaccattgactgcttcatataaatcttctttgatttttgttttgtccaaaatagtgtcctccatcttttttctagttctttccgttataatccattatgatatatcttgagaagatacacaaaagaaaatgatttggcggtgaaaaaaatgaattatccaatcaatcagtggatcgagttagagagctttgagatttatcgtgactggaagacaccgcgaggatttctatgcggcacctatgctagtagtgtattgctggcttattggcaggatcagctggatgagaattgcttgccaaatggtctacgagaaaagaacagtcctcagaacgaagagctcgttcatgcactgcagcctttattacagccgattgattttcccacagttccgctacagatttctttgggcttgaatcgtttctttcgctgttatcggattccttatcgagcaagaggcaccgtcgcggggtcttggcagcgggtgactaaacgaatcttagctggagagccggtcatgatcggtcttttgcaactgctgggcagcagttataaaaatcattgggtcgtcgttcatggctttatggagaattcagctggacaaagattttacaagattcatgataattggggaaagagtgaggctgtgattccggcggagtggggaaatggcacgatttcattggtctctcagataaaatagtaatgacgttctgctcaaaatccgaacaatcagttgttcccctcgtattgaaaaagtaaaatctacagcaaataactcaaaatatgttaaactggtggtacaaaaatacttggagggacaccatgtcagaagaaagtaaggataagtttaaaatttttagtcttaatgggaacagaccgttggctgaaaaaatcgccgatgtctgtggcgtaccgttaggaaaaagtacggtcaaacagttcagtgatggagaaatctcgattaatttagaggagaccgttcggggatatgacgtttatttagtccaatccaccaatgagccagtaaatgattattatttagaattattaatcatgatcgatgctttgaagcgagcgagtgcaaaaacgatcaatgttgtattgccgtattatggctatgctagacaagatcgtacagctaaacctcacgagccgatcacagcaaaattgattgcgaatttactttcagacgcaggtgcaacaagagtattgacccttgatttacacactgtgcaagtccaaggcttctttgatattccagttgacaatttatttacgatgccattgtttgcgcattattatcgtcgtcgtggaatggtgggagatgactatgttgtagtttctcccaaaaacagcggtgtgcaacgcgcccgtagtttggcagagtatttagatacagcaatcgcgatcgtggatgtcgccgaagaaggcaatccagattctggatatgtgatcggagatgtagaaggtcgctgttgtatcatggtagacgacattttgaacactggagaagttttctccaacgcttcgaaaacgttaaggaaggcaggcgcgaaggaagtagtcgcttgtgcttctcatggtttgttatcacctccagcaaaagaaaatttagatgctgctgacatcaaagacatttgtattacagattctgttctaactgggcctgagcgccaccctaaaaaattgtcgattatcagttgttcagatttgatgggtgaagcagtgaaacgaattcatgaaaatgaatctgtcagcccattatttacgatggaacaaaaagattttaagtaaaagggcagcattgcccttttctttttttcgattaaaataaacttcgcagagggaaaggttcgaaagtttgtggaaaatatatatttagatcatgcggcaacgagccccatgcatccagaagtagtcgcaacaatgacggaaatccttacagaaacattcggtaatccatcaagtgttcatttatttggtcggcaagctgctgggaaattggaaatggcgagggaagtcatcggtaaaagtcttggcgtaaaatatcatgagatcatctttaatagtggcgggacagaaggtgataataccgcgattttggaaacagccttttctcgccagcaggaaggccgtcacttgattacgacgcagattgaacatccagcggtgatcaatacgatgaaatatttagaaacacaaggttttgaagtaacgtatttgccggtagatcgcaaaggaaatatttctttagaggatttagatgcaagcttgcgtccagatacaatcttagtttcaattatgtacggcaataatgaaatcggtaatttaatgcccatcaaagagattggagaacgcttgaaggatcatccggcatatttccacaccgatgcggttcaagcttatggaaatcaatttattcgacctcatgagctaggcattgattttctaagcatttcagctcacaagatcaatggaccaaaaggtgtcggctttttgttcaaaagcgataaagcccaattagcgccattgcttcatggcggcgagcaagaagaaaaacgccgtgcgggaacggagaatttagccggtatttgcggaatggcaaaggctgttgaattgttaacagaagaagaacgggaaaaacgacgtgagttgtatgaacagtttacccagaaagtgttaacgacattggatcaagcagacattgattatcaggtgaatggcgatttgaataataaattgccgcatgttttgaatttgcgctttactggaatcaataatgatttgttgctgatgaagttagacctgcaaggtatcgcagtttccactggatctgcttgtacagcaggaacgattgatccatcccacgttttagaagcgatgtacggaaaaaaagctccagaaataaaagaatctgtacgggtaagctttggctatggcaatacgatggagcaagtcgagtatttcgcagaacagctagtgaccagtttgcaggaactgactaagaagagataatctggattgaaatgcttgatacttatctttataattaatagtgaaagaaaaagatgaggtgagtatatggcatttacaaagacagcaacgattaagggttcaaaatatcaatatgcattagcgcctactgctaaaaagtatacattgcgtgacaacggctttacagaaacaagctctggcaatttccaattaattcgtccattgcaagcaactccccaaagtaaagaaggctttaagctgaaaattacggtggcaaaagatatcagtaccttgaagatgtcagtgacaacagcgaatggactaaaagctgtagatattttcaaagatgcaaaacaagaaatggtccaagaaaaattttactttctgatggatggtatgattgatcgcggattgtttgttaaagaagaaatttaatcatagagagaggttgtgacagaagctatttctggaacaccgtttgtacgaaagaggaagctgtgacaagatttttgtcacagcttcttcttttttctatttaagtagaagaaaagcgttggtcgctaaaaggattttaaaagaaatagaagcatcagttatttaatcattaaaaataatgatattatttttaggtaacgcttaattcgaaggggcatcaattataatctgacttctaatttagtatatttacctttttttctgaatctttttaacgctaaggagcttcaaattaaaaagattatggtacactgatagtaagaatattgttggaaatgaaggtgagaagttggttcacaagatacaaacaatcgagcatcacaaaattatttctgatttccgtctcttgtcggggctgaccgtctcaattgaagactgtgccaacctgacaaaagagttaaaaaaatacggtgtcgaagattactatatcagtgattatgaagggaatagttatctaactcgctatgtagactactttatcgatgggattccttgtttgaaatataagaaaaaatatttgattcctctgatttttcgtgacatgcccgacacacaaaagatgttccgcgatagctatcgctgggaagctttttttattctgttagattggtacctaaaatataatcctgaaaaggttatcattcaatgtaaaaagaaaaaaagaaaaatggaagtggtcgatacagcttttttgatcttccgtttgtgggaaatttgtgatggagcagcgtttccgattgcaaatctcaataatctttctgaatttgaacgttggaaccagatctttcatttgattgatacaggaaaatcctttaaacgaacaagagaattcgatgcgaccaaagtagaagatctgacacaacttgaggcggtcatcacaattattaaaatgaaatatcaagcaattttacaaaaacaaggctaccaggtataaactggcagcctcagactgtagacaaaagctgttccaaactcgtaactcgagcttggaacagctttttatctacttcgtttcgaatttttgaacaaaaaaataaaggctccttgcctttccatagccaggtggctaatttctttaaattcattgcagcaaacactagcatcgtatgcgtcgcgactttttccaagcctcgatacttggtccaacgcatcccatgcttttcttttgcatctgcaaatattcgttcaatcgtttgtttccgttttttgtaaattgatttattcagatccgttaggcgaagatgttccacttcatccatcagatctccccaaacatgtctcgtgatgactcgttgatgatttttacttttggtacattggtttagcagaggacagttcacacattcttttggattggatttgtattctcggtacccttctcgagtaaccgttgaaaaagcgagcatttgatcctgcggacaaatgtaacaatcataatactcgtcatagagaaactcgttttttgataatagcccttttttccctttgggccttgaataaggcaaacaaggtcgaagattcaaatgagtcaaaaagtgaacaaacttaggtgtcttgtacccagcatcagcgacaacacagttgatttcaggaaaaagtctcttcgattgtttgacgagctgaaaggcgacttgactgtcatgaatatttccaggagtgatgattgtgctaagaataaatccgttgtcgtcacatgaagtatgggcagaataagcaaattgtttttctcgttcgcctttgacgtagtagccgctttccggatcagccttacttatttttctttctttcagcttcacttccttttctaagtccaaagtaaaagggcgttttccggcctctattcgttgacgattgatctcatcttctaattcatcctgataggctttcgcttcatcgtgggtcatttccttcgtaaacttatgtttattggcgttagctttgatgtgggtagaatcaagatacaaattatcctctgttacaaaacctgctttaactgcttgttctaaaatataggcaaaaatatcctcaaacaccgtcgtttctctaaatcggcggacataattctttccaaaagttgagaaatgggggattttctcctcgaaggaatagcctaaaaaccagcggtaagcgacattggtatcgacttccttaatggtttgccgcatggaacggataccgaataaatactgaataaacaccaatttgataagaatcactggatcgatacttgggcgacctaaatcggagtaagtggcttcgacgattggataaataaattcaaaatcaagcgcggcatcaatctttcgaacgagatgatcttgaggaaccagatcatcaatcgtgagcatcgcaaattgatttctaccgttcgtattgtttttagacatcataactatcactccttgcattcgttttcataaatctattataaaagaaaagactgtagacatcatccataaaacggactttgtctacagtctgaggctaccaggtataaactggcagccttgtttttgtgagtccaactttttgcagtttgctttgttcgagaaaaataaagattatttgataaggtaagttacgtgaactttagttggatcgtatgcgaagcgacaatgaaggattttttctgctttttggaaaaattattctttagaaggagttagctgtcagtcgcactttttgcagtttgtattagttggaaagtaaaataatggacttagcataaattatttctcaagatgtttagtgcgatgataggcgtgatgagaatagaattaacttttttgctttttgaaaaagttaatcccattgttcgagttagctgtgagtccaacttttcgcaatttactttgttcgaaaaaaacagatgagcctgttagctgtcagttttattccctgcctttttctcaagcagcgcttttttttagcagagatggtaaaataaagatatgaattagaattcgttttgtaggtgattagaatgaaatattttatatcagatacccattattttcacgaaaatcttttaggcgataatgactttgcgccgcgcctatttgattctgtcgaagaaatgaatcagcaaatgattactgcttggaacaatgttgtcaacgagaaggacacagtctatcatttaggtgatgttgcaatgcacccattatatgaaaagggttttaaggatattttagagcaattagtgcagttaacgggaaaaattgtatttatcaaagggaatcatgattcacggaccttttttagatatttagctgcccatgatcctaaacttgcaaatggagagaacaaatttgagttccatgatgttggggcgatcgttaaatttaatcatcatcaatattatttgactcattatccgatgcttcttggaaagactttaaacatccgcaaccttcatggtcacattcataactatagtatgccgattgctgaagatattaatgttggggtcgatgcaccggaacgcggctttttgaaaaatccattgcctttcgggacaccaatctcagagaatctaatcgatgagatcgcggattacaaagaagcagagataaaaaaattaaaataagcctaggcatcgagaaatcgatgtctttttttaacgactatgctgatagtgaacaaatgcataaaaaggcaacgtgctgttttcatgacggagctgctatggtaaattaaatataaagatcatacgagatatttaaataagggaggaaaaaagtgaaggttaaagaaattgctaaaacggttcttttatatgttgttatgataggtgcggtaatcgcgttacggcattacgtattttcacctgtagaggcgattggagattcaatgaagcctaacctgaatgatggtgagcggatgtttggattgaaacatgcggagatcaatcgttttgatgtggtaacttttccagcaccggatgacccgggaaccgattatgtgaaacgtgtgattggcttacctggagataccgtcgcttacaaagacgaccagctttacattaatggaaagaaatatgatgagccatatttagaagagtataaaggcaaattgacggacggtcagccattgacctttgatttcgatctgcaaggtttgtttggctacgaaaaagttcctgatggacaattatttgttctgggagataaccgacgtatctcaaaagatggacgaatcatcgggatgatcgatcaaaaggatattttgactaatgtaaaatttgttttctggccaatcaatcggattggcgtcgttgaataaaaaaatgatcccacttcatgcaattggagtgggatcagtttttatttattgatggttcttcacttcttgatagagctgtttggtagcagtaggatctgtgttggtataatagtaatctcgattttctgtctgaatttgtaaaattggttttgattgatagtccacgaaaagagaggcggattttccagcaactttaaagctgccgatggcgtaattctccgttgccagtccgttcactttcataccaacacgtggtaagcgttcaatcagagccattttttctatatccttgtagggaatttttcgttcccggtagaatgggccatccaaaataacactttcctgctttatttcataggttaatggatcgggatgatagtctaaaatgtataaaggaacaacggtgatcaccatagcacctatcagaactataggcagcaagccgataaaaatttttccaccaattcgtgctaaattcaccgtgatattcaaaccgatacggtcaggaaccattaatcgacgatcgtcagggttgtagtaaatcccatagcgccaataataatcatcgcctgtatagcgaaagctgggtgcttgagtcaataactgatcctgtttgttacgcaaacggatcagccaccacagggtaaagccgcagaaaaggaaaatcgccaagaactcaataatcgtcaataggttaaagaggcgtggactagattccaaagtaatcaaaggcagataaataatcaacagaacaaagaagcttgtacctgcaataaatgctgaccagtaaaatttcgtcagatcgttatatttccgattgatttttgaatcattggtcaaagctcgcacaggcagtcgactgattgcccaccaacctgccagaaacaaaagtaaaacaaatatgtttgtgccgaagagaatccaagtcagacttcccatttctcgctgttgaagaagtactgtcaataaaatcaggagtacaaatgaaagaacaaaccaccaaggagaaacaagcttttggtttttctcaagtacaagcttggtatcgacttgtattggctgctgggttaattgccagttattctctacaatcaattgatgccctttacggatataacgaatttgcaagaagtatccagcaccgattgtgatataaagaagaatgaaaaacagcagcataaaaatagaatccttcatagggatcaacaagcttaagtctaagatagtcaatagaaatgccagttgaaattgatgctttcgataattttgtctgaaagctagtactagcggatcattgattttatcagcaggaaaggtgttttccacgataacataattgtggggcttagcggctaaagaatttgtaaacgccatgataaagttacaagaaatcaatatgactaaaataataggagataacatcagcgctcatcctttccgaaactcgtcaaaatctgttgaactttttcttggattgctttttcatcaggttcagctaaataaagttctgctaacagtaatgttaaattttcttcgttagtttttttagcggcaaccggcaaaggagcgaccaatgttcctttacgacgatcagtgatcaggtagccttcttctcgcagttgctgatagccttttgaaacagtcattgtatttactcctagttcatccgcaaattgacggactgtcggtaactgttcatttggctgcaattcaccttgagcgatgccgataatgatttgtttacgtagttgtaaataaatgggttcttcagaacgatgatcaatttctaagatcatatgctcactcccttttgtattgtatatattaatacaaacaatacaaaaagacaaataaaatttttctgaagaattatctatcgaaaatttaagatttatgttgtataattcgtcatactgaaaagttgcgaccttcaaatcgtagagttttcggaaatctattttgaaatgatggtgatactgtgtctaacagcaacacaagagtcgtcgtaggaatgagcggcggcgtcgattcatccgtaactgctttgttgttaaaggagcaagggtacgatgtagtcggcatttttatgaaaaattgggacgacactgatgaaaatggtgtttgtaccgcgacagaagattataaggacgtggcgaaagtcgctgcccaaatcgggattccttattactctgtcaacttcgaaaaggaatattgggaccgagtctttgaatatttcttagcggaataccgtgcaggccgcacaccgaacccagatgtgatgtgtaacaaggaaatcaaattcaaagctttcttggattacgcaatggaactaggtgcggattatgtggcaaccggacattacgctcaagtcgaaaaagacgaaaacggtgtggttcacatgctacgtggtgtggacaacaacaaggatcaaacctatttcttgagtcaactttcgcaagaacaattagcaaaaactatgtttcctttaggcggtatgcaaaaaccagaagttcgcgcaatcgctgaacgagctggcttagctactgccaagaaaaaagattcaaccggtgtttgcttcatcggggaaaagaacttcaaacaattcttaagcaattacttgccagctaaaaagggcaagatggtgactttagatggggaagaaaaaggtacacacgatggattgatgtactacacaatcggccaacgtcaaggtttaggtatcggtggcggcggaaaaaccaatgatccatggttcgtcgtcggcaaggatttatctaccaatacattgtatgttggtcaaggtttccatcatgaagcactatatgcgacaagcttggatgccagtgaaatccacttcacaacgaatgaagatcggccaaaggaatttaaatgcacagcgaaattccgttaccgtcagcaagatgtacccgtaacggttcgtttattggatggtgatcgtgcggaagtaatttttgatgatcctgttcgtgcaattactccaggccaagcggttgtattctacgatggtatggaatgtctcggcggcgggttgattgatcatgcctatcaagaaacaaaagaattacaatatatttaatgtatagaactgtaaccattttgttatatgagattatcaagcgattaaacttaggtgacaaatagcacaaaaaaaactaaaagggaggggaaccttccttttagtttttttgtgctatttctgaattttgaaaaagaccgaaattttgatggtgatttttttctatgccagactctgagcgaaatgtgccattgcaactttaacttcattcagtttttcaggtttgatcaaaggaaagagcttttcctgtagctgtttaaattcttctaagcttaaagcattggtttcttgatccgcaaagcttttaaccaagatttcctttgcttgctcttcttttccttcaattgtattgttcaggaaaaagtcgagaaattttagttgtccctcaagcatgttcttcacttctttcattcatattctttcttagtatagaaaactactcaaaaagttgccattaataagtctcgaagtctcggaaattaatgcgtttgatgactttgatgcagcttctcgctgatttcttttgtattgcgatgtaccaatagatagttggtcaacacaagagctgaggttgagataaagacccctcgatatccaaagatcgaagaaacgctagaaccgatcatcggtccaacaacattcccggcagcttggaaggattgattgtaactgaatattcttccagcagcttcttgcggcgaatacttcgtgatcagggcctgtacagcaggcagaagacaagcgtcagagattccaactaagaatcgcaaaaaggccaattgccaaacatttgtaacgatagacattggcaagaaaaccagcattgcaaagattaaaccgatacctagaattttttcgctgccgattttatcccccaagcgaccaaaacgcggtgctgcaatcaaagtagcgattcccgggattgaagcaataattccgctgacgagtgtgacgtttccatgattgtgcatcaattgtctaatataaagactaataattggactaatcgaattatttgaagcttgaataatcagggttgtaacgaacataccgattacaacgtggggatatttcaaactatgaaagatctcttttgcaggaagcatatcgtttttctcaactggggtgaattcttcatgaacgaagaagagactaagcaagaagactaaaaacaaaatacttccggtgataaagaaggtcagacgatagccgaaaattgaggcagtaacaccgcctactaatggaccgagtaagttgccggtgacagcaccagttgctaaagttccgaggacttgtccgcttttttctcgtggagttccagttgcgactaaggctgtggcgttactgatataaccagaaaagacaccttgaagtaaacgcaaaccaatcaactgatagacatttcccacagttcccatcaagctaatcacaattgccataccaagagaagcacgcaatagcatcaatttacgtcctttttggtcagctaagcgtccccataaaggtgatacaatcgcggtgatcaaaaaagttgaagaaaaggtaattccactccagaagtttaattgctggttgctgtaacttcctaatgagtcaatatataaggacataaagggcatgaccaaactaaatccaatgccggccataaatgtgccaaaccataaaacgatcaaattcttttgccaagtgggtcgaggttgaaataacgaatttttgattttactcaaactaaaaaggccttctttcaattttataaaacttgcggttatttatgaactacagaataaattcttttgatgtaaaaattcaaaaagctccgtagccggccattttgctaatctctagaaagcaaaaaatagcacctgcgaaaaacagagcaaataaatccaatttacattataactctcttaaggaccatgtaaaatcccgccgctttgtgttacgatagaattaagaaaaaagcaatatttttctgaaaaaggatcgtagaaaacgaactttttcaagatcctgtatcagctggaaacatttttcttgaatttttatttcatgatacttatgattgagatggaaagaagggtaacgggatgtatcaagtaataacaatgtatggagataatgaaccttggtggttctttgaagaatggcaagaagatattcaagaaaccgcgacttttgaagattttgacgcggctgtagcatattatgaacatcgttggagcgagctccaaaaaaccaatacatatagtaatgcgaaacataattttttaagtgcattttggaaagaccaagacgaacgctggtgtgaagagtgtgatgattatttgcagcagtattggggtcttgcgttattaaaagacgagcagccgttgacggttgacagcagaaaggaattttatgaaacagctaattatagcggaaaagccaagcgttgcaagagacttgagcaaggtgcttaatgccaaccaaaagaataaaaattactttgaaggacccaatgttgtcgtgacttgggcccttggtcatttattgagcctgaaaatgccagaggatttaaataaggaatggcaaagctggcagatggaaacattgccgatgattcccaaatatattgggatcaaacctctaccaaaaacacgtggacaactgaaatcaatccagcagctggcaaaacgaaaagatatctcagaggcagttattgccactgatgctggacgtgaaggggagctggttgcacgttggatcttagagtatgtgcggtttgaaaaaccagtcaaacgattatggatttcctcacaaacgactaaagcgatcaaggatggcttcaaaaatctaaagccggcgaaagagtatgacaatttgtattactctgctttagcacgagcaaaagcagattggcttgtgggtttgaatgttacacgagcgttgactgtaaaatatgaagataatctttcagcgggtcgggtacaaacgccgacacttgcgatggttcgacagcaagaaaagaagattgaaaaattccgtccccaaaattattttgtcatttcattagaggtggatggacaaaaaactaaactcaatcaaaagaatccgtatggcattacggaacgtgaagcagcagaaaaattagtcaaagagctgtcacagcaaaaagggacagtcactgacattacagaaaaagaaaaaacagaaccagcaccgttaccatatgatctaactgaaattcagcgagaagccaatgcccgctatcagttttcagcaaagaaaaccttgtcgctagttcaaagcttatatgagacgcacaaaatcgtgacctatccacggacagacagcaagtatctaaccaatgatatgaaagcaacaatgaaggaacgtttacaagcagtcagtgattttgcgccagaggttaaaacttacattaaaaacggagcacaagtgaagcagaaacgtgtgttccaggataacaaggtgacagatcatcatgcactgattccaactgaacagcgtccacgctttgagaagttaaccactgatgagcaacgaatttacaatatgatcgtgacgcgatttttaggattattcgccgacgcccataaggagagtcagcaaaaagtaacggtaactttccagaaggagacattcaccttccgtcacagcaagatcttggtagctggttggaaacctacagaagaagtcaaaaaagctgttcaatggacagctggtatgaagatagtaccgaattttacgatcgaaaaagctttaactacaccgccaaaacctttgaatgaaggaacattgctggctcaaatggaaaagcatagtttaggaacgccagcaactcgcgcggaaatcattgaaaaactgattaaatcggaattgatggaacggaccaacacaggcctattagtttcaccaaaaggcaagcagttgctggaattagtaaatccctcgctagtgactccggagctgacagaaaagtgggaaaagcaattagagtcaatcgctaatgggaaatatagcagcaaacaatttctacaagaaatcgaagcagacacgaagaagctagtcagtgaagtgaagcacagcgataaaaaatatcaggatttctccattacggcgaagaaatgtccagaatgtggttcgccactacgagaaaagaatactcgagatggaaaaatttacatttgtaccaatccagagtgtaattatcgccgccgtaaagatccaaaggtatcaaatcatcgctgcccgcaatgtcaccgcaagatggagatcattgatggaaagaacggttcttacttccgttgtaaatacgatggaacgacagaaaaaatgctagataagaaggaacgttcgaagaaaatgacgaagcatgaagaacgtcgtttattgaaaaaaatcaatgatcaagaggaaccacaagaaagtccattagctgcagcattaaaggcagcaatggaaaataaggattaggcataaaccgcgaagacggagcagtcttcgtggtttatttagttttaaaataaataaaatcgctgactttttctttacctaaatgaataagttaaggtattttattgaataaaaaaaccgtagatcactattttcattttttcgtcttaaaaatcaacatctgttgattaatcaactcgtgtgcactataataagaagactattcaaaagtttcacgcaccaaaatttatatttatgattaaatgaacaatagttaatgaatgatcggagtataataatggatcggcgaaaacgaaaaacacaaacgacaattacagcagttttctaccaacttttaacgaaaaaaagctatgaagaaatatcggtcagtcaaatttgtcaggtagctgatattaatcgtggaacgttctatctccattttatcgacaaagacgatttacttgaaaaaagcatcgcttatgaaatgcagaaattagtcgaatactgtgaggataacggtgaaacgaatagtcagcgtaagttaggaaagacttttgaatatatcacggatcatcgtgaacaattgaagcggctagttcatgcagataaacagggattttttgctcagtatcaaattgactatttaatggagcagctgactgatcaatctcagttgacgagtgttttctttgctcatggaattattggattgatggaacattacttaatgaatgatatttctgaaaaggaaatcgctcaggaattggataaaattaccaaattatttcattagatggaactgatttttcaaagataattagtagatattcaaaaagaaaaggtttacaatataaatggtttataccactttcgggagggatttttttgaaatcgagaaaagatgaagtactagaagcattgagagcaaatcctaacgaacagacagcacaagaattggcagatcaaatgggggttgaccgtacaaatgtcagccgttatctaaatgaactaactaaagacggaacagttaaaaaaattgatggacgtccagtgaaattccaaatcgcaacggtttctaccgagcaacatattaattttgataatttaatcgggcgtgaagattctttaaagagtcagattcaaaaatcaaaggcggctattttatacccacctcgggggttgcatacgattatttttggcgagactggaacgggtaagacaatgtttgcggaatgtatgtatcgttttgctgtttcagctaaggtcttagatgaaaatgcgccatttattactttcaattgtgcagactatgcgcaaaacccacagctgctttatggtcacattttcggtgtgaagcggggagccttcaccggtgcagaagaaacaagagttgggctaatggaacaagctaacggtggtattttatttttggatgaaattcatcgcttgcctccagaaggacaagaaatgctttttaccttcattgataagggaactttccgttcattaggcgatggcgaagaaaaacaagcctctgtacaaattatcggagcaacaacagaaaccagctcaatgttcctatctaccttcaacagacgtatcccaatgcaaattgagttgccctctttagcggagcgctctttagatgaacgcttggcaatcattaaggaatttcttcaacaagaagccaatcgattaatgcaggagattgcgattgataagcggagtctgttagcgtttcttctatacaatgcagaaggaaatatcggccagctaaaacgtgacttaaaattagtctgcgccaaagccttcctccactaccaaaccaatagtgaatcagaaaaattaatgatcgtagaagaagacttgccgctggtcgtacaaaaaggcttgttgcgtatgaatgaggttcaagacaagctgatgccatttatggataagcgaaacctctatttgactttgaagccaggcactgaagaagttgtttggggtcaagaccctaataaagacatggaagtttatcattcaattacctataaattggaaaaacttggtcgtgaaaacctatcagagattgatttagaagaattgatttccaatgatgttgatcaatattttgaaacctatgtcgaagagctttctcatagcaatgcttatcgggaaattatttctgatgatctatggaaattagtgaatgatctctatgattttgcgtcagtacaaatgaatcgtgagtacgatgaaaaggttcgctttgcttttgctttgcacatcaattcaacgattgaacgaattcgcggcaatcaatttatttcacatcctaatttaaatggcattcgccgcaactattccaaagaatttcaattggcgatcgaaatttccaatcgtattgaggaagcctacagtatcatgattccgctggatgaaatcggatttatcacgatgtttttaacgatggataatcaagagacacaaaaggttgacgaacgacaagtagcagtattagttgtcatgcatggtaaatcaactgcttccagtatgctggagacggtgcaggagcttttgggaacctccaatggtattgcctttaatatgccgctgactttacgaacagaggcaatgtatggtcagatcaaaaattatattcaaggaaaacaagaggagttttcagagggtatcattttattgacagatatgggatcgccgaataattttggaaatctgatctttcatgagatgggtatccgaactcgagtaatttctatggcaagtacaatgctggtgctggaaagcttgcgtttagcaacattaggtcgttcgttagaagaaatttacacaagtgtcatttctatgttccaaacaatggttcgtcttgaagaacctacgcaaaaggatgaaaagaaagtgatcatcgtcgcctgctttactggtgagggtgtttctaagcgattaaatgaggttgtttcgcaaatcgtcaatttagaggaatttgagatcattcaaatgcaatccttagaacgagaaagctttaagcatcgaattgatcagttgatcactcataaagatatcgtggcaatcgtcggcaccatggagatccattaccaaaagatcccatttattccagcgatgaatctatttaaacgcgataaaatcttagaatttcaagatttgttaggaagtaccattaccctgccagagatggttgattcattaacaaaaaacttttctccagaactggatgttaagacattattcttactgattgacgacgtactacaaatgattcgcaaagatcaagagctgatcatcgagaatacagcgatacaagcactgagtgtgcatattgctttcttagtagacaaaatcaagaaaaacgaagagcggccgccatttgagaatgtaaaatattttcatcaacagcatcgtttgcgattcaatcaaacggctgctaatctctccatgatcgaaaaacagttcggtgtacgttttacagaagatgatattgcctacattgttaagacgctagaagataatcgaattgaactaggattgcacagtgtgtaatcctagtttttttgtgtgtaaattgaaaaccttatcacagcagcttgtgtgcgcaaaaaaagttggcacgcgaattgctttatataaagtgtacaataaaaaaattagggagtgtcagatatgaaaagaattatgttagtttgtgcggcaggaatgagcactagtttattagttacaaaaatggaaaaagcagctgaagctcaagggttagaatcagatattttcgcagtttcagcttcggaagcggatgcaaaattagaagatgcaagcaaaccagtagatgttttactattaggcccacaagttcgttttatgaagagccagtttgaaacaaaattagcggataaaggtatccctgttgacgttattgatatgaaagattacggcatgatgaatggtgaggctgttttaggtactgcactaagcctaatgaagtaagaaattaaaggggagctaagcaaatgagcgaaacaatgagtcaggaacaattagaagcagtaatgggcttgattatcaatgccggtaacgctaaaagcgatgccatggaagcaattcaagcagctaaagatggtaactttagtttggcacaggaaaaacttgaggcagcggatcaagctttagtagaagcacatcattctcaaacagggctgttgactgaagaagctagtggaaatccaatgaccgtgacacttttggctgttcatagtcaagatcatttaatgacgagtattacctttaacgacatggcaaaagaagtcgttgatctatacaaacgtttgggtaacgaataggaagtgatcccgtgaaattagctcgtgatcatgaatcgttgaaagcgatcacaggtttaattgaatacgcttttaggaaacaacaaccaatcatcgatgatccgcttttcttatcacgttatgaacatgctgatagttatggcatgtatcacgatggtgaattaacaagtttggtcatggcgaatcattttgaaattcaactttttaatgaaagagttaaaatggccggtgttggttatgtcagcagctatccagaatatcgagggcaaggcggcgttagtaatattatgcctgaactcttgacggatctttatgaacaaggtgtagcagtatcccagcttgctcctttttctgaaagtttttatcgtcaatttggatacgagccgactagtcgtagaaaaatctatcgtattccagcattagcctttaattatttaccaagtgaacgaagggggaatgtcaaacgcggaacctggcagcagatgaagctggtgatccaatcgatttatcagcgcttattgaaacaacagcagaatggaacagtgatacgtgaagactggtggtgggaacgactagatcattattattcacatcgattttatgccgttgcttacgatgatgctggtgaagcgaaaggttacattatttatcgaatgcaaggcagcacactgatagtagatgagcttgcttatgaaaacgaactcgcactgcgaaaattattaacgtacttaaaatcccacgtctcatcatttgaagaatttctttattatgcacctgtccatgaacttattgaaaaatgttttcgtgaacaagagcagcttaaaattactctagaaccttatatgatgagtcgaattatcgacattaagcaattattaccgaaacttccaataaaccaaaaagaaattattttagaagtaactgaagataaggaatgtccttggaatgttggtagctggctagtcagtcaggggacttgtcaaaaagtacatgaagcaggcgatatcaaagcatccattcatgagtggagcgaattattattgggagaattgactttagcagaaggagtttttcttggcaaagtcacagctgccaaagggtttacggctgaaatttttccaaaaggtcgacaaagtttttatgattatttttaaatagggggaaatacaaaaatggataaatttatcaattttatggagaaacactttatcccacatgcatcaaagatcggtaatcaacgtcatttgatcgcaattcgggatgcctttacagtaacaatgccgttaatgattttaggggcattagcggtaatgttaaataacttgtcactaagcattccagccttcggtaagtttatgaacggcatttttggcggggattcttggacaggttttggtggagctgtttggaacggaacatttggtgttctatcagttttcatcgcgttcctagttgcctataacttagcacatcattatggtaaagatccagtaggtgcaggggtcgtatctgttgcttctttctttactttaggtgcagcaactagcggaatgaactcttctggtttgttcgtagcattgatcgtcggtatcgtagtggcagaagtcttcactcgtttagtcggtaacgaaaaattagttattaaaatgccagaaggcgtgccgccagcagttgcccgttcattcgcatctctatttccagcgatgatcactgtttcaatctttggtttaatcgcagcaattattgccggatttggtgttaaagatatgtttgctgaattctatgcattggtacaagaaccattcatgggcttagctaactcttacggctcagcattgctaattgccttcattacgccattcttgtggttctttggattacatggtgccaatatgatcgacccattcatgcaagcaatcaatgcaccagcgattgaagcaaacgctaatgcgttggcagcaggaaaagcagcgccttacattgttaacaaaccattcgttgattcatttgtaaacatgggtggtacaggggtaacaattggtttaatcattgctatctatttagttggacgtaagaacaaaccgttcatggttgtaaacaacttggctgcagcacctggtatcttcaacattaatgaaccattgatgttcggtctaccattggtattgaacccaattatgtttattccattcatcttgacaccaatgatctgtatttcaactgcgtattttgcaaccagctttggttgggtgccagcagcaacagttatgccaccatgggtaacaccaccaatcattggcggattcttggcaactcaaagcttctcaggtgcaattttagcggctgttaacttagtaatctcaattgtgatgtacgtgccattcgtatcattagcaacaagacaagagcttaaaaaagtagcagaagcacaataatttattcaaagggggtgcggatcactggattccaccccttttaatattgcaaaacaactaatttttagaatgaggtagatatacaatgaaaactttcccaaaaaatttctggtggggtgctgcgacatctggcccacaaagtgaaggacgctttaacaaaaaacatgcaaatgtcttcgattatcactttgaaatcgaacccgaaaaatttcacaatcatgttggaccagatgttgcttccaacttttacaacagctatcaagaagatatccaaatgatgcgttctatcggaatgaatagtttacggacaagtatccaatggagtcgtttaatcgatgatttagaaacgaatacagttaatcaggatgctgtagatttttacaacaatgtgattgatgcaatgatcgccgaaggtatgactccaacaatgaatctgcaccattttgacctaccagtagaattatttgataaatatggtggctgggaatcaaaaaaagtcgtagagctgtatgttggttttgctgagaaatgctttgagttatttggggatcgggtaaaattctggacaactcataatgaaccaatggttgttgttgaaggtgaatacttattccaattccattatccaaatatcgtggatggaaaaaaagcagtacaagtcgcttataatttaaacttggcatccgcaaaagccattcaagcatttcgtaaaatgaacattgaagatgcgcaaatcggaacaattttaaatcttacgcctacctacgcagcttctgatgcgccagaagaccaagaagcggcaaggattgcagagctatggaacaataaaatgttcctagaaccagcgatttatggacattttccaactgaattagaagagttattaacgaaggacaaggtcctatgggaaaccacggatgaagaaaaagaaattttgaagaataatactgttgatttcttaggtgtgaacttctatcatccaaatcgtgtgaaggctcctgatgtagcaccaaattcggttggtgcgtggatgccagaccgttattatgatgcttacgatatgcctggacgtcgtgtgaatctagatcgcgggtgggaaatttatccaaaagcgctttatgatattgcggtaaatatcaaagaaaattataaaaatattccatggtatgtctctgaaaatggcatgggtgtctcaaatgaggagcgcttcaaaaatgctgatggcatgatcgaagacgattatcggattgattttgtccaagagcatttagaatggctgcataaaggtatcgaagaaggctctaattgctttggatatcatatgtggacaccaatcgattgctggtcttggctaaattcttacaagaaccgttatggtttcatttcaaataatattcatacacaaatcaaaacggtgaagaaatccggttactggttcaaagaggtaaccgaaagaaacggtttagaagagtaatcaaggaggggaaatttaagtgaaacgtgaactaggtatttcagtctatcctgatcatagtgatccgcagacggatcgtgactacattaagaaagcggcggagcttggctatacgcgaatttttatgagtatgctggaagtgacagaaggcaaagaaaaagtcagcgaaaaatttggtagtatcattcattacgcgaaggatcttggttttgaaacaatcttggatattgcgccatcaattttcgatgatttaggcatttcatacgatgatttaagcttcttcgctgagcttggtgctgaaggtattcgtttagacgaaggctttgacggtaacaaagaagcgatgctgagttataatcctgaaggcttagcgatcgagctaaatatgagtaataatgtcgcttatcttgataacattttatcttatgaagccaacgagccattcatttatggctgtcataatttttatccgcaagagggttcggcattgccatatgacttcttcatcagctgtagtgaacgcttcaaaggtcatgggatcaagacagccgcttttatcacaagtcatgaagcgaaatatggaccatgggacgtgaatgatggactgccgacattggagatgcatcgtcatttgccgatcgatctacaggcgcgtcatatgttcgcgacaggactgattgataccgtgattatcggaaatgcctacgcttctgatgaggaactagaaaaagtagccgcagttaatcgttataaagtaagcttaggtattgaatttgtgccagcagcaacagaaatcgaacgtaaaatcgtagctgatccgaagcatttccgtcgcggcgatattacttctactgctgttcgctcaacaatggttcgagtgaagtatgcagatgttgcaaatcctgttcatgacaacacccaagaatttcaagtgggagatgtcgttgtaggaaatgatgattttggcaaatacaaaaacgaattacaaatcgttctagaaccccatagcgattcacgaaaaaatttggttggaaagattccgccagaagaactgattatgttggatttcttgaagccttggtctaaatttcaatttgttcctaataattaaatttgagacagatgataaaaagatgaaggttcgttattgacaaaccctgaaaaggcgtgtaaagtatgactcaacttaatcaaacgacaatgaaaagaagagtagcagttcatttgttctcagagagtctctggtaggtgagaagaggcagcaatgttttgtgaaccacatctttgagtcgatcagttgaatttagtaggctgatccgggagcgcccgttacagcagaggtcagattgaccagttgagatcgttcgttgtgagacggcgatgaaaaaaggtggaaccacgtgattacgtcctttagtcctagcgactaaaggacttttttattttcacccgctggaacggctgacccgtagaggtcctttttgcgaaaaaaggacaaagacgaggtggaaccgcgtatttaacgccctctggtagagataccagggggcgttagttgttttttgagaaagattcgaaaggccgtgcaactttcgaaaaaatggagggatattgggatgaactatttgatcgacgtcatgccgcaattattacaaggggcaacgacaacactgaaattatttgcttttaccatattaggctcattgccgctagggattttattatcattcgggttggcgagcaagtttaagccgttgcaatggattttacgtttttatgtttggattatgcggggtacaccactattattacaattgatttttgttttttatggattgccgttagttggaatcatttttgatcgttttgatgcagcgttgtttgcttttgtattgaactatgctgcttattacgcagaaattttccgtggtgggattcaatcgattccagttggccaatatgaagcatcgaaggtgatcggattaacaccggttcaaacgattacgcgaatcattattccgcaggtcgtaaaaattgttttaccgtctgtaggaaatgaagtgatcaacttagtgaaagatacgtcgcttgtttatatccttgggttatcagacgttatgcgcgcggggaaaattgcgatggagcgtgacactaccttacttccgttattcggtgtagcaatcatttacttagcgctgacaggagttacgtcagttatcttgaaacaactagaaaatcgtttgaattattatcgttaggcaggtggaaaaaatgattgaattaaaaaatgtaaacaaatcctttggtagtaaaaaagtgattaataatttggacttagtcattcctgatggacaaatcttagccatcgtcggtccatctggaggaggtaaaacgacgctgttgagaaccctggctggattagaaacagctgacagcgggacgtttttattagatggaagcccctttgatccaacttcttcgaaacaacaggagcaggtcgttggcgtggttttccaagatttccaattatttccgcatttgagtgtgatggataatattacgatcggaccacgattagtcttgaagcaggataaagagacctatacaagcaaggcgaaccatttagctaaattattggatatcgaagaattattaaataattttccttatcaattatcaggtgggcaaaagcaacgcttagcgattgcccgggcgatggcgatgaaccccaaggtattggcatacgatgaaccaacaagtgcattagatcctgcgttacgtcagcaagtagcgagcttgattttagaattaaaagcagacggtgtgactcagatcgtcgtaacccatgatttagattttgctgaggaaattggtgacaaggtattgaaggtagaacctatcaaataaaaacgatattaggaggagttagtatgaaaatgaaaaaattggttttgggaatggtggctgttttgactttagtgagtttagccgcgtgtggaaagaaagaagccagcggtgacgacagctggaaaaccattgagaaggataaaaaggtaacgattggtttagatgatacgtttgtaccaatgggcttcaaggatgaggatggaaaaatcgtaggctttgatattgatctagcaaaagcggtttttgaccaatatgacatcaaagctgattttcagccaatcgactggtcaatgaaggaaaatgaattggacaacggtacgattgatctaatctggaatggctatactgttacaaaatcaagagaaaagaaagtgcttttttctgatccttacgcgcaaaatgaacaagtcttggtcacaaaaaaagacagcgggatcaccaaagcagcagatatgaaagataaagtcttaggtgctcaagaaggttcttctggctatgaagcctttaacaatgagacaaaaaccttgaaggacatcgttaaagaaaacgatgcaaccttgtatgctagcttcaatgaagcaatgattgatttggaaaatggtcggatcgacggagtgttgattgataaggtttatgcggattactacttgaagaaggcgaataaactagatgaatacaacattttcaacgttggtttcaagaatgaaaactttgcagttggcgcacgtaaaggcgataaggaattagtaagtaaaattaatagtgcattcaaagaattacaggacaacggcaaatatgctgaaatctctaagaaatggtttggtgaagaatggtctttaccaaaagagtaatcagaacgtccccttaaattttaattaaccaaaaagaaaaggcgagcaaaacttttgttcgccttcttttttttgtataatggtacagaatggaaagagggataacatggcgcaaaaaaagcgtacaaagaaaaaaagaaaaacgaaaaagcaaaaacaactacaagaacagcgcctgatcatcgggcttgggcttttatttattttattcacagtctttgccatatttaaattaggtttcttaggaaatttaattgcaaatgtattacgcttgattggcggcaatacctatcagtttttagcattgctattaggcttttatggagcactgctggtagcgaaaaatactaagctgcgaataactaaaccacggcgttggatcggtatcggtgttttctatttagggattttattgattctccatgcccgtttgtttatgaaagtggagagccaagatccaaatattttaaagacgacttgggatcttttaatggtcgattttttaggaaatcaaatcacccaaaatgttggcggcgggatgcttggagcggcactttataatttgacgcactttttagtatcacaggtcggtagttatttgatcgctgttttactattgattcttggtattttcttgttcagtctcttagaatttaaccaagtaaccgattatcttgcccatcttgttgataccttgcgggagaaattctctgaatcagacgagaaaaaagcgcaaaaagctgctaaaaaggaagagcgtcaagcgcaaagggcacaagctaaagctgaaaaacaagcagccgaaaaagcaaagatggaagcagaacaagcagaacgtgaaaaaaacagagtacgttccttgaccccaggcgaacaactggcaaaagaaagccaagagcgtttagagaaagagcctgagcaaatgaccttggtaccaatcgaaggcttccaagaaaatttagagcctttgtcagcaactgcggcaccagtagcaacgaagaaagtggagcttgatgaagaagaaatcgatgatcctggtgatttagaatttgaaatcaatgcagaaccggaagatcatgattatcaattgccgccttctacgttactggattcgattccagcggcagaccaaagcgatgaatacaaaaaaatcgaacaaaatatcaaagtactagaaaaaaccttcaatagctttggcgtagatgcaaaggttgtgaaagccagcttaggaccatctgtgacaaaattcgaggtacaaccagccgttggtgtgaaggtcagcaaaatcgtcaacctaaccgatgatattgccttagccttagctgcgaaggatgtgcggatggaagcaccgattccagggaaatcactgatcggtattgaggtgccaaacagtacgatcagcatggtttccttccgtgacatcattgaagcccagcctaatcatccagataaattattggaagtaccattaggtcgagatatctcagggatggttcagaccgccgatctatctaaaatgcctcacttgttagttgcaggttcgactggtagtgggaagtctgtttcaatcaacggaattatcaccagtattttgatgcgggcgaaaccgaatgaagtcaaattaatgatgattgacccgaaaatggttgagttgaatgtctataacgggattcctcatttattgacaccggttgtaaccaatccgcggaaagcggcacaagccttacaaaaggttgttcaggaaatggaagagcgctacgaaaaatttgcggcaactggagtgcgaaacatttctggcttcaatgaattagttattcagaaaaatctagaggatggacaaaatcgtccgattttaccatttatagtagttatcgtggatgagttggccgatttgatgatggtggcaagtaacgaagttgaagatgctatcactcgtttagcccaaatggctcgtgctgcaggtattcatatgattcttgcaacacaacgtccaagtgtcgatgttattactgggatcattaaagccaatgtgccatcacgaatcgccttcgccgtttccagcggaacggactcgcggacgatcatcgacagtaatggggcggaaaaactattaggccgtggagacatgctgtttttaccaatgggagaaaacaaaccaattcgtgttcaaggcgccttcatctctgatcatgaagtagaacgtgtagtagaatttgtttctgatcagcaggaagctcactacgaagaaaaaatgatgccaacagaagaaacttcttcttcgccatcagaaacaccgcaggatgaattgtatgaagaagcaaaggctttagttatcgacatgcagacagccagcatttccttgctgcagcgacgctttcgtatcggatataaccgagctgctcgcatcgtggaagaactggaggagcatggcgtgattggaccttccacaggcagtaagccacgggaagttctcttacaaaaagcagaagaagagctagaaaatccattagaggaataaaggataaggtgtgacaaggggaattgtcacaccttatttttgtagtctttatccaattaaaaaaatagttttttatagatagttcagtttgtgaatttttttcttttttccaaagttgattgttttctctttgtgaatcggttatagtatgtagcgaatgtctgcttacttttcatctattacagagcaaacgtagttataaattaatcattgaaaaatgatttcgtttaaatgatttaggaggaaataccttggaaaaaccctcaatttatggtttaagaagagaagaattagttgaatggtttctagagcatggcgagaagaaatttcgcgctactcaagtttgggagtggctttatcgcagtcgtgtgagcgagttttcggaaatgagcaatctgtctaaacaaaccatcgcactactagaagagaactttatcatcaatcctttaaaacaattagttgtacaagaagctagtgatggcacagtcaaatatttatttgaattgccggatcatttaatgattgaaacagtcttgatgcgtcaggaatatggcttgtctgtttgtgtaacgactcaagttgggtgcaatattggttgtacgttttgtgcgtctggtttgttgaaaaagcagcgagatttgactgctggtgaaatcgtggctcaaatcatgttggtccaacactattttgacgaatgcggtgaagatgaacgtgtctctcacgttgttgtgatgggaattggcgagccgtttgataattacaataatgttatgaatttccttcatgtcattaatgacgataaagggatggcgattggcgctcgacacatcaccgtttcaactagcggattagtaccgaagatcaagaagtttgcggaaaatggtttacaagtaaacctggcgatttcgttgcacgcgccgaacaatgaagttcgttcgtcgattatgcgaattaaccgcagctttccaatcgaaaaattaatggaagcagtggattattatatagaagaaacaaatcgtcgagttactttcgaatacattatgctttcaggagtgaatgatcgtccagatcacgcgcaacaattggcagacttaatgaagaataagaaaaaattagtttatgtgaatttaattccttataatcctgtcagtgagcacgatcaatattctcgcagtagtaaagcagatgttctgcgcttttacgatgtattgaaaaagaatgggatcaattgtgtaatccgtaaagaacatggtacagacattgatgctgcgtgtggacaattacgtagtaaacaaatgaaaaaagctacagtcaaataagcatccagactctctcaatatcgggagagtttttttctgtgtttataaaattcattaataatataagtttaactatgagatggtccacatgatgcctttaggagatcgtggaaaggaaaaataggcccttcagtcttaattagttgtgatacacttaaaagaaaaggtcttcaagaatgccggttctgtttttttcaggcagcaaagtattaagataaatctcatatttagaaacaatctgaaaagagactggcaaaaaaaatacattcatgggagaaaaaaatgaacgagacagacatccaaacgattttagagcatcggtatgatcaaggctgggattattggacgacagaggatagacgcttgggaaaaggagcgcccttttcgtgtttagaatcagcggagtatttattagagttgggaatgaatccgcaagaagaaattctgcaaaaagtagcagagcttctatgggagagctggcgtgaaccaggagaatttcggctttatcctaaaggagcagtcttcccatgtcaaacaattccagcggctacactgttggtacgcttaggtcatgaagatgatccacgaatgaagcaaacgctgaaacatttattgactacacgctacgaagatggagggtggtggtgcaagaaattctattttggcaaaggtccagaaacggaattttctaatcctttgcctactctgaacgcgttagaattattccgacggataaattttgttgaggaaactgaattagatgatgcggtggattttttattaagccattgggaaacgaaacttccacttggtccatgccattatggaattgggacgctgttcatgcaagtagaatacccatttcgcgggtacaatttattttattatctttatgttttgtccttttataaaaaagcacgaaatgaccaacggttcaaagaagcctttaaagtattgcaggaaaaaacggtggccgatcaaatcgtagtagaacgggtagttcctaaattacgtaaattaaacttctgcaaaaaagatcaggttagcctgttagcaactgaacggtatcaagaaattttgacgaatatagcggaataaaagcccatgatatttttatgcgtatctttttaacaaaagaagaggaggtacgtcatgaaattaattgaagtaaagagagagtatgggcttaatcaaaatacattttacggctggttaagagaaaatcaaatgatcatcaaagagatgacaggatatgttattggtcctaaagcttttgagggtatggagacaaggacaaatcggagggtgaatgatgacggtgaaattttgatcacgactcaagttataattgataatcaaaaaatccctcaattattggaacagtatgaatcctccggtttaccaaaactttactcgaaccgaagagtggagagtgagcgacagcgagcttctaacggtgaattagaaaaacgtgtggaaattctagaaaatcagctagctatcttaacggaacaattagctatctatgtaaatcaaaataaccgaaagcacacgtgaaggtgctttcggttattttttcgtattacgctaaaatcgtgccgacaggaaaaagtcttctgaaaacttttcgaacgagtggtccagcgataattatttgaaatggcagtgccatcacaagatttttcaaaatgttcgttccccacataatgaacaatttgttccattcatgtgtatggcttaaaacttcaatagagccataaagcgacatgaaaaagaccatgggtaaaaccatgcagctagaaatggttaagactttgcgtaaaggactagcaaatgtaggcatgattttgaatgcgatttttttcgctgtagtcgaaacgacaaaccagtccagaattaaagcgcagcaatagcccaaaggtaaaccgagccaggctgttttaagtacctctaaagtgattgtaccggattgtaaagcgatattatataagctcatccagaacaccatcacaaaacacatcattatcgtataaacaaaactttctcttttattacttggcataaaaatcctcctaaatttaaatatggtgaattcataaacaggtcatgaatttcaagacgcaaaaaaaggcaatcatataactcgctacgattgccacttgggatcttcactgcgttatggaaagtcattttttgctttttccattatatacagatttttatgattcatgtaagtaaaatttttattttttttcaccaatttcatcttttaaacgataaatcttagaaggacgaccgattccgactggtcgttcgccaatttcatcaaaatattgcagcattgcttttttgaaatttgagtgatcgacggttttataatcaacgcctaaaaatttcgcaaaaactttacgtgcttcagtaatcgtaaattcttcacctaaaacctgtaaaattaatggttcgtgatccattttgtttaaaacacgattgaaggctttgcggataatctcattatggtcaaaggctaaagtatctttaccgattgattttccagcctcaagctcaatttcaattgaaataccatcacttgttaagcaaatcgtatcgccgtgccgttccagattaaaccagcgcgcatcctgtgtatcatctccagcagtgggaggtacttgtccaataaatgcaagatagctgacagtaatcacccaaccacgaggatcacggttcggtgtactaaaggtatggagctgctcgacactttttcggccgatagttaaaccggtttcttcagcggtttcgcgacgtacactgtcgttagtggattcattgcgctcaacgaatccgccagggagtgcccaagaattacgataaggattgccgcgtcgctgaattagtaaaatttttaattgatcctcttctttgttatagcccataatgacgatatcgacagtgactgagggcttgtcatactcggggtggtcttgttctttataccaagcaatgaattccgcttcatctgcttcgtgttcatagtaatctttttctgcttctttagaggcaaattttttcatctacagttcacctatttcttataagtattcgctaccttattgtagcatgaataataaaaaaaggggaactccgcttggaattcccctttactactcataattattttgatgagtcagttgctttcttatttgaactatttgttgttaagaagtcagataagatattttcaaatgaatcatctttgatcttcacgtttgctttcttcaattcttttgaaattacttcagaagagaaggtttgatcagccattttagtgtcttcagcgatttgttttaattcctttttgtatttatccatgtcattgcctttagatgaatttttttccatcttaacaatgtagtagcttgattggtaagtagatgaatccattgccgtaatcacatcagaaacttcgccatccttcaacttaaaggctgcttctttaacttcagaaggaacagttgttgattgtgagtcaaatttgatttcgccgccatcttttttcgttgttgaatcttgtgatttttctttagcgatcttcgcgaaatcacctttgtcatctaattgttttttgatttcttttgcttcatcttcgctgctagctaaaataatgcgagcagttacttctggatggaatgaatcccaagcagcttttatgtctttatcagtaatttttacatgagcttttaatccttcttggaaagctaaagactgtttcaagtattctttatacgatttttttgtatagccagctgattgtagttgactttcaaagctatcgcctaattgcttctcttgtttcttatattctttgtcaatttgcttgtctgtgactttatcaccataggcattttcaaaaaccttatagatgatcatgttacgtactaaactttggttcgattgttcttttttcgcttcattataaaaatcttcgacggtaattttaccgcccttcattgttgcgatgtcttgattagaacttcctgaacaagcccctaaaacaattacactaagtaagccagtagtggctaaaagaatctttttcttcatttctatgctacaactcctaaaaattaaaatttacatctgtttgttattcctgttcaactataacacacctaaaaatgtaaaggaaaggggattaaaaatagtttccgagaaaattcacaataaaggcataattatttttaatgaaataaattggttactgctatccagcaggacgctctaaagaatagcggcccttcttgattacttttttttcatcgacttcaggcaaggccagattgattttgtcaatttgttcttggatctgttgaatgcgcggctccgcttggaagcgaaattcctcgatatccttttccacgccagatttaaaggcgggaactaatgtatcaaaggtttcctttaggttcgttacagattcacgaaaatcagccagattatcatttaattcgtccgttaatactacgagttcacgcgtattagtgatcagtttttcccgggtttcttctcctttacgtggtgctaatagaagtccgccgagtgttccaagaccggcaccaaataaaattcctttaaaaaaactcatttatttcacctgctccttgatcttatccgcgatcgcttgtaattcttctgctgactgttcctccgcatgattaccaaaatgaatcgaaaaatcatcctttttactgtagcgagggatcagatgaacatgtgagtggaaaacagattgatacgccaactctttattattatttatgatatttaagcccttcatttcaggaaatgctttttcaagtgcacgggcaattttaggaatacgtgtaaagagatcagcggctaaattttcatcatattcaaaaatatcagttacatgtttttttggcacaactaatgtgtggcctttcgttgcttgcgagatgtctagaaatgcatagactttttcgtcctcataaattttgtagctagggatttcttgatcaataattttacaaaaaatacaattttccattgcaaacatcctttctcattcactcatattgttttatattgtgccgctgctgcaaaaagcaggtaagcgatcgtaaatacttcttttactttaccataacttgtaatacttgtgctggaaaaggttgggagaagattaattatttataggattctgctataatgtaaactatgaaattgagtgccgcttcagcgaggctatttctgccttaaatttagaaaatgagaagccattagtttttcgtataaatagagtgaaacgaactaggaggataagtatgagcttaacgattcagcatgttacgggcggctacggtcacttgcctgttttaaaggatattaattttgaagtccataatggagaaatgatcggtttgatcggcttgaatggagcagggaaatctacaacgatcaaaaatatcattggattattgacgccgcagaagggaactattgcagttgatgacttgactttacagcaagatccagagaactatcgaaaaaagatcggttatattcctgaaacaccttcattatatgaagaattaacgttgcgagaacatatcgaagttaccgcaatggcatatgggattccaaaggatgaggcgatgaaacgggctgaatcattattgaagacctttcgtttggaaaatcgtctagactggttccctgtgaatttttctaagggaatgaagcagaaagtgatggttctatgtgcctttttaatccaacccagtttgtatatcatcgatgaaccctttttaggattagacccattggcaatcaatgcgctattagagctgatggtaacgatgaaggagcaaggggccgcaatcttgatgtctactcacattttagcaacggcagagaagtattgtgatcgttttatcgtattgcatgagggtgaagtacgagcacaagggactttgcaggaattgcaggcggaatttaatttgccaggttcctctttggatgaaatctatattgcgttgacaaaggagaaagaacatgcatgatttttttctattaaggcggcaacgccatcagaaaaaaatgatgaaatatatgcgctacgtattgaatgatcattttgttttggtgtgcttgtttttagtcggaggactagccttttattattcaaatcttttaaaacaattaccgacagattttccttggagcttgccaatcgtaggaattatttggtggtttatcttaccatttggtaagttagcgaccttagttgaaccagcggatatgacctttttattacctaaagaaaaggaaatggggaactatctatcacgcggtttacgtcattcaatcgcttttccattcgtaattgaactgcttatttgcggagtgttattgccattagtggttttagccaaacaagtaagttttgtaagctttttcttttacttactaatgctttggggcctaaaattaggaaatttaagaatacaacgcttagcatgctaccaagaaacacgggagcaaacgcaacgtttgactgtattctggttctgtgtgagtggtgtgattatttttgctagtttatatggatcagcgtggcttggcacgattttggctttcgtagcagtatttgggttcatttcgatcacgcaggaaaaggatcgactgttggattggagtaagatgattgatcaggaaaatgctcgcttgcatcggatttatcaatttattaatttgtttactgatgttccagaagttgaagcaaaagtacgacgcagaaagtatttagacggtttattagcaagaattcgcttcaagcaagaaaacacgtatctttatttatttgcccgcagagctctgcggggagcagaatttggtggactgttctttcgtttattgattgtaggcggtgtattgctattttcgctgaatgactttcgctttattgcgggtgtcagtatgctgtttatttacttaataggttttcaaatgattcctttgtataatcagtttgattacattagtgcgactcagctttatccagtttcggagaagtataaaaagactgctttgcgtcagttaatggtcattttgttatctgccgcggcaattattttcaccatttgcagtatgatacatttgtctattgtcggaagtttcgctttaattgtgttacttttaggtgaaattggcttgtttgcttggttctatctcccgaccagaataaagaaaatggaggattagtgaatgaaagtattatggaatgaagaaattgtcgatgaatcagaagtaaagattgatatagaagatcgcggttatcaatttggtgacggtatttacgaagtgattcggatttatgatgggtatatgtatatggaaaaggagcatttggaccgtctttgggtcagtgctgaaaaaattcgcatgacacttccatttacaagagaagaattaagtcagcgtctgcatcgcctagcacaagaagttggacttgaaaatgctcgagtttattttcaagtaacacgtggtacagcaaaaccgcgactacatgattttcccaatccgaaagaagttcaaccggttttgatggctgatattcaacctgcgtctcgcccaagtgcgaaacagaatatcggtattcgcgctggttttgtagaagataaacgctggctgcattgcgacatcaaatccatcagcttattaggcaatatcatggccttagatgaagcacagcaaaaaggctatgacgaagcagttttagtacgcgatggcattgtaacggaagcatcagcatcaaatttgtggatggtgaaagacgaagtgctttatacccatccagacgggaatcttgttttaccaggaatcgcaaaaattaaaattcgggaattggtaaaagctttaggtatcgaattgaaagaagaagcattcactgaaaaagagctacttgcggcagacgaatgttttaaaacgagttcagtagccgaaatcatgccaatcattgaaatcgataatcaaacaattggtgatgggacgccagggaaagtgacgaaaaagcttcttaacgcgtatatcgagtcagtgaatttagcggttcaggcgcatcgtgatgaaaaataatcaaagaagaacatacatgcccttgacgaagcgactttccccgactaaaataggaaatacgtttaaaatgctaggggagggccttgggaatggagtttcagttggatagtgactggcgtgtgcagccgatcaaaggtgatacgggaaaaacgtatatcggctatcgtgacgaagatcgcgtcttcattaaacgaaataccaccccaatgttggcggctttatctcgtgaaggaatcgcaccaaaacttgtttggatcaaacgaacaggaaatggtgatacactgactgctcaagaatggttggatggtcgaattcttgagccagaagaaattccgcgtcgaaatgacgtggttgatgtattatatcatctacatcactcgccatcattgaaagtgatgttaaaaaaaatgggtggacgtcaagtgtcaccacaacaactattagctgattatgaggcgaatttgccgacaatgattgagcaaaatggttttattgaattagtgtatgattatttgaaaaaaaatatcccaacctacgctaaaaagaattacaccgttgttcatggggatgtaaatcatcggaactggttggtttgttctaactatttatatctagttgactgggattcggtgatgttcgctgatccagcattagatattggtacgattttaggaaactatgtaccattatccagctggagtaaatggctcgtccgctatgggattcgcccgacggatgaaaatatggaacgagtatactggtatggcttaatgagcttgctgctagagatcgctcgtcagtataaacgagaagaatatcatcatatgaatcaatcaatcttacaattaaaacgaatttttgctggaagctgaacgtcttgttcagctttttgtaagttcaattaacggatgaataaaataggtttgttcatggaaatactgttattgattttattttaaaagaactttttggagggaaacaatgcgcgttagaaaccgtccgggggctgcagaaatgctggctgcccgtcctgaatatgttgtacaagaaccagaagcgtggaaaggccgctggtctgaacgtttcggtaatgatcatccgatccatattgaaatcggtatggggaaaggtcaattcatcactggaatggctgctgcacatcctgaaatcaattatattggaattgagatgcaagtgagtgtgatttctatcgcactagataaattagttgaagcagaattgccaaatttacaattattgcatgttgatgggtcggagctgacaaattattttgctgatagtgaagttgatcaaatatatttgaacttctctgatccatggccaaagaaaaaacatgagaagcgacgtttaacttcaccaagcttcttagcagtagatgaggaaattttacgacctgctggtgagattcattttaaaactgacaatcaaggattgttcgaatactcactgagtagtttttcaaaatacggtatgacattggaacaagtttggttagacttgcatgaaagtaattatgaaggaaatattatgaccgaatatgaagaaaaattttcaagcaaaggacagcgaatttaccgagtggaagcccgttttaaagacaaaacaaaataattgctacaagaagatgaactttttttggtttatcttcttttttttgaagaattgaaaatgttctgcgtatattattttcgaggtgaaaggaatggagattgaacagttttcagacgaattgatccaatatggtttcgatcatcaaatgcaggatttatatttattacctcaaggtgaaaagtaccgctacttttttcggagaggtcccttctatgaacataaaaactcgactctatcctatgttaataatgaaatgtgtgtggtttctgccctgcagttgatcaatcgtttcaaatatttgggtcaaatggatgtcagtgaaaaacgaaaagctcagcttggtgcgatctcctaccccttgcctcatagtgaacaacggttacgtctttcgactgttggaaattatttacaacaagaaagtttagttattcgttttctgcatcaatttggtcgcagtcccgaagtatatcatttaccagagcaaattgaaattctccagcaacacacaaaaaaacgtggtttatacctattttgtggtcccgtaggttcagggaaaacaaccttaatgtataaattggcacgagagatggatggtcaagtgatcacgattgaagatcctgtagagattgaagaagcagatttcttgcagttgcaagtaaacgaaaaaatttatcagagttacgatgaactgattaagctgtctttacgacatcatcccgatgttttaataatcggggagattcgtgatacgaaaacgattcaaggagcgatcagagctgctctgactggtcattgtgtgtatgcaacaatccatgcggccagcctagagtctgcccatgcgaggatttttgaactgggtggggaagccacactgctcaaagaatgtttacagggaattgtttatcaggaactgttgtcagtaaatgaaacggtagggttattgactagttatcgattttataaagaggaagtacattttacttggaaagaagggttaaatcgtgtggcgcaaaaagcaaatgacgagaaaacaacgagttgattttgttcatctattaggagatctcttgcaaaatggttttagtttgcagcaggcgtttgctttttttatcaatgccaatctttttgcaccgtctattttggaagccgttcaacaagatttacatcagggaaaaagtttggcactaagctttacccaactgcggtattcgaatgaccagctcttacaaatcgaattagcggagactcatggggatttggcccaaacgctattaggaatcgctgaacaaatgcgcttagttcaacgtcagcgagaaaattttctaaaagctgtatcctatccgctgcttttactcgttttcttaatcgtaattcttttaggtatgcgttttttcttacttccccagctattgaccagcggaatgatccgtgcagaagacttttctgtacagttaataaaagcagttcctatgattggattaggaataattctttttttgctcttactgatggtcagctggaggaattggggaaagcggcataattatatagttcgctttcgtttcttggcgaaaattccacttgtaggaacattgttcagcaattactattcagcttatttcgcattggaatggggcaagctttttcaacaaggtttagaactgaatcagattattgaatgtttgttggtaattgatggaaaatcattgatgcaagagcttgctgctgatttaaaaatccgtttagcacaaggcaatactttagcagcagaattaggacgttatccttttttgactaaagaattcagtcgaattgtgtttcagggagaggctcgcggaaatttagcaaaggagctattaacttatagtcaattagtttggcgtcgtttttttaatcaattagaatttttggtttcatggttgcagccgcttgtctttctaattgttgcacttttgattgtcagcttgtatttaacaatgctgctgcctttaacaaatttggaggggatactgtgaagaagaagctttcaggttttactttgttggaaatgttagttgttttatttattattagtctgctgttgctgttatttgtacccaaactaatgagtcaaaaagaaagcgcaaccaataaaagcgatgctgctattgtcaaagttgttgagacacaaattgaagtctttgaactggattatggacgtaagccagaggaaggtgaattagtcagtaaaggttatgttagtgaagaccagtataataaatatgtacaaaagaaataaatttagcggcttcaccttaatcgagacgttgattgttttagctttggtttgtgcttttgtattgttgccgacgattgctatcaaaagctggcagcatcaattggaaaaaaactttttctattatcaatttgaaaaatctactttgcacttgcagcaagtggctattgcagatcatcaaagaactcgaattagtcttaatagcagttcccaattaattgatttctataccaatcataccgaattatcatggagaatattgcccgttccaaaatcaattaaattaggcagcaggtattcgatttattttaaagctggcagcggtaatgtttctactgatcagcctgggaatggaaatattccaaaggtcgtttttactgatgaaggaaaagttattacctatcagtttcagatggggagtggtcgttttgaaaggaaataaaggatatatcctattagagagcttggtcagtttaaccatcttattaattatcgtagccagttatgtcggtgttaccgtacaaatgcaaaaagaaagtcgccaacggttagctactcttgaaaattatcgtgatttatacactgagacaagacgatgccgtttgcactttctggaaatgcagagttcacaaatggagatttctgtggaaaagggaatagctatacaccagcaaggaggaatcgtgattgtcaaaaagtagcggcttcaccttgttagaaagtttagtggcacttttgatgcttagtggtattttattgttgttgtctggtttggttaaacatgcgaataaaatggaacaagccatcagcggttaccatcaattggaatgggaagtgtttttgcttcaattagacaatgagttggaggaagttaactatttgtctagtacaacacatgaaattaatggagaagtggaaaacgcggaaggggaaatagttgctgtaacaattaagaaaaataagcagcggattgtaaaaagccaatccaatggttttcaaccattattgacaggagtgaatcaatttgtgtgtaaagaaaataatcatggtgtggatttcatcgttaccttcgttgatggaaagaagaaagaaggaacatggatctttaaatagccaaggcggagcgctgttgtccgtcttattggctatttttttattcagttttttgctgctaaatttaacaacaagttatcatcaaacagctgatctggtggagcgtactgaacacttatatcaggctaaaattgcaaaagaactatttttagccgactacccgaaattaaaagaaaaagagggtgtgtgggagttcaacaaggggggactgtcatacgaaactgaggaagattatgtgaaaatcgatgtgaaaattaaaaagaaaacatatcaattttgtgaaaaaattagcacatctaattcatctgactgatatagttcgtggtatcccgttgatgagggggaatatcttgtaaaagatacattaggttgaattagaaaatcaataataaaagaaagaaagcgattgattaattacaatatgtccgctaaaatagaacaggtatcgtgagtgttatattagtttgtgaggtgcaagatgaatccagaaaaaattgaaacagctttttctttgatggaagaagcgatcatcgcattgcagcattcactaggaacttctttttttgacgcttacatcgaaaatacggagaacttagttgacaatgcaaaagtacgcgtgcttgatcaacaacctgatgctgatactgtcacaaaagtagaagcattgtatcaaaaattaataggattagagcttgagcaagaagattggcgtaaattaacgcaattgattttgcttaagggttcaaaaacggaaagcttacagccaaaccatcaattgacgccagatagtattggctttttatttgtttttctaattgaacaattaacgttaaaaaagaatcaaccattagaaattttagatattactgttggtatgggaaatctattactgacggtgttgatcaatttacaggcagcagattattcagttaagggaatcggtgtggataatgatgagacacttcttgctattgcagcttcaaatagcttattgatgaaggaagaaatcaaattattccatcaagatagtttacaggacttgttagtcgatccagttgattatgtgatcggtgatcttcccgtaggttattatccaaatgatcagcaagcggagaagtttgcgactcattctgaaaaagaacacagctatgctcatcatttattgatggagcaagccatgaattatgtgaagcctgagggttttggtcttttcttagtaccaagtaattttttagaaactgaacagggcccgttactgcaaaaatggttaaaagatgaagtgctattgcaaggaatcatccaattaccagatgaattatttaagtctgagcattcacggaagagtattctactgttacagaaaaaaggtgaaacggctgaacaagcagaaaaagtattgctcgttcatctcccatcattaaaagatccaaaacaagtaaccgagttcttcaaaaaattcgaggactggaagtcttctaatttataaactgctcgtaggagctaaaagcatttcaattataaaggagagttaaaatgtcaaaaacaattgcaatcaatgcaggtagttcaagtctaaaatggcaactttatcaaatgcctgaggaatcagtaatcgctaaaggaatcgttgaacggatcggcttgaatgattcaatctttaccatcaaatatggcgatggagaaaaatttgaacaaattttagatatcaaagatcatgaagttgcggttcaaatgctattagaccaattaatcgaactaaaaattatcacatcatttgatgagattactggtgtcggtcaccgtgtagtagctggcggtgaatattttaaggattctgttttgattgatgatgaggtcttggaaaaaatcgaagaactaagtgaattcgcaccgttgcacaatccagcaaatgcaatgggaatcaaggctttccgtcatattttgccaaatgtaacaagtgtggctgtttttgacacttctttccattcaacaatgccggcaacgaactatttgtatagtattcctaaagagtattatgataagtattctgctcgtaaatatggtttccacggaactagtcaccgctatgtttcagaacgtgcggctgaattacttggcaaaccgattgaagaaacgaagattattactgcccacattggtaatgggggttctgttactgctgttgaaggtggtaaatcagttgatacatctatgggcttcacgccgttagcagggctgacgatgggaacacgtgctggggacattgatgcttcattgcttccatatctaatggaaaaagcaggaatcaaggatatcaacgagatgattgatgtattgaacaaaaaatcaggtgttttagggttaacaggtatttcaagtgatatgcgcgacatcgaaaatggtgctgacgaaggcaatgaagaagctattttagctttggatatttattgtgatcgtatccgtaaatatatcgctcaatacatttcagtaatgaacggtgttgatgctattgttttcactgcgggtgttggtgaaaatgctgaccctgttcgccgtatggttttagaaaatatgacttggttcggtattgaaatcgacgaagaaatcaataagagcattcatggaaaagaagcggaactttcaactgaaaattctcgcgtaaaagtatacgtgattccaactgacgaagaagtaatgatcgctcgtgacgttgagcgcttaagtaaataaccaatgaagcctttgccaaaaatggtgaaggctttttgtatcgaaagaataaactttaggcaggtaaggaaattttcgatgaagaaatctgaaagcataattttgttgtattagaacaaaactatgctatttttttgtgctaaactttttatgaaagtgagagtgactttttatgagtgaaaagagaaatatcgagcgttcgattcaagaatatgtccctgggaaacaggtcacgcttgctcatttgatcccccatgctaatgaagaagtttttgaaaaattaggactggagcattcgggtgacgccattggtattttgacgattacaccgagtgaggcatcaattattggtgcagatattgccaagaaatcaggaaatgtctctattggttttatggatcgctttagtggagctgtcgtgattatcggagaagtatcctcagtcgaatttgccttaaaacaagtgacgaattcacttgcagcaatcttgaattttgatgttgcagaaattactaggacttaatgatgaaacgagtcattttaattggagaaactggatcaggtaaaacaacccttatgcagcttttgaatgaatgggagatcaagtatcataagacgcagcaagtatactttacagataatgtgattgatacaccaggcgagtttttggaaaatcgtttctattataatgcgttagtcagttcggcggttggtgcggattgcatcgcgcttgttcagagtattacgaatcgtcagaattattttccaccttgcttttcatcacgttttactaaaccgatgattggaatcattacgaaaacagatttgaatcataatcaagcagatttagatttagcagaaaaacgattacgattggcgggggcgaagaaagttttttctttgtctactgttaaccaagaaggtgtttctgctttaaaaaactttttattaacaaaagatttttgacagcgaatacattctgcggtaccatgagtgtgtgaataattgaataagagcatttggaatagggaacaaggtgcgaatccttgacagaccctttctactgtatacgcagacaaaatctcaaatggccactttcgggaaggcgagatggaggatgaagcgaagtcaggatacctgtccttttgctgagataattgtattgggagaattatttcacctttaaatagtcaattgatgtttatttggtgaggtgtcttccatagatacctcaccttttttgcgtgatccacttctcacaggttttatagagaaaagagaaatcttaatttagaacaaatgattgataatgatgcggatggattcacctgtatatgaaaataagctcagttttaaaacgaatttccttacagtagaactaattgctccaatataaaaaaacagtcgtaccacgactgtttagattccttattttattttccgataattaacaggtgtcatacctacaagttctttgaatattttacagaagtagctagtttgtgaatagccgatattttgtgagatagacttaatacttaaattagattgtgtcaaaagaacttttgcctgctcaattctttgttgattcaaataggtaataaaactgacaccgatctcttttttgaataaacgactgaaataaaactggctgagataaacatggttagcaacatcttcgagcgtcaaatttgttgttaaattcgtatcaatatatgaaatagctttacggatttcatcatttttcgaaattatagaatctttagcttcttttttacttggatgaaagttaaatttaatttgttcacgaggatcagaatcgttaaagtggtagtcgccaattgttttgagtaaagcagccgcggattcaatttgagtagtactgactgtttttacttttcctctagcttgacgtagttcaggagaagtttcccaatgggtgacaatcggatggatacgagtatatgggtttttgtcatcatcagtaatctctacctgaccgaaaagagcaaatccaattaattgattattgctgatgataggtaatgaaatgtcagtaagaccagcatgacaacgatagatacagggatcaccattttttgacgcctctaaaccgccaaacgcatcgcatttttgacaaagggatttgaattctggattagagcgcatcaactggcaaaagggagaaaaattataaagatcagaagtctcctttccgtgtatatcaacaaggacggaaccaaaatctgccgcaagtgcgaaatcctgaattgttttggaaagttgcaaagaactatgggaattcaatgtactaatattttccatgtaagcgcctcctagtcatctaccattttaccagaacatatttttattttaaatcttgtttataccaataacattattttgaccagcagaagacaaaatattgctatttattgaacttaattgaccactgattaaggcttatttagtaatgtcttgacactaatctgcaacaaaattttaacattcgaattaatccgacaaaaagataggacaaatttgttctatcttttttgtttatcattataaatgtaagtgttatcaaaataattaggaggaatgttttatgccacaagaagcgctaggaatgattgaaactagggggttgattggtgctatcgaagcagctgatgcaatggtaaaagctgcaaatgtttccttggttggaacggaaaaaattggttctggattagtcactgtgatggtacgaggagatgtaggtgcggttaaagcagctgttgatgcaggtgtttctgcggctgacgcggtaggggaagttgtttctaattatgttatcccacgtccacatactgaagttgaaggcttgctccctaagtcagaatagaaagggtgggatagctgatggcaaacactgatcaaaagatcgaagagatcatgaaacgcgtgctcgcaaaaatggaaacaggaaatgagatgaaaaacactaacggaggagatcgaaaaatgattgaaaagcaatgtgcgttaactgaatttgtaggagcaacagagtttggagatacaattgggttagtaattgctaacgtcgattcatctttattagaaacaatgaaattagagaaaaaatatcgttcaatcggaattgttggtgctcgtactggtgccggacctcatattatggctgctgatgaagcagtgaaagcgacaaatacagaagtaatcctaattgaaatgcctcgagatacaaaaggcggagctggtcatggatcgatcgtgatcttcggtggcgacgatgtatcggatgtgaagcgtgcggtagaagttacgttgaaagaagttgatacccgcacatttggtgatgtatatggaaacgaagctggtcatatcgagtgtcaatatacggcacgtgctagttacgcatgcaataaagtatttggcgctccagttggaaaagcatttggtattttagtgggtgcacctgccgcaattggtgttgttatggctgatacggcgttaaaatctgcaaatgttgacgtagtttcttacgcaacaccgcaaaatggacaaagcttctcaaatgaggtaacgatgacaattacaggcgattctggtgctgtacgtcaagcaattatttcagcacgcgacatcggttgccaattattgggaacaatgggaagtacgcctaaaaatgatcaaccatcatacatttaagagtgggagtgaaaaatagatgaaatcaaaacgatttgaagaactagaaaaaagaccggtcaatcaagatggtttcgtagatgaatgggtagaagaaggtttaattgcaatgcaaagcccgaacgaccctaagccaagtatcaagatcgtcaatggtgaagttgttgagcttgacggaaaagacaaagcggattttgacttgatcgattcttacattgcgcaatatggaatcgatttgactcgtgcggaagaagtaatgactattccttctaaagagttagcgaataaaatcgtcgatccaaacatttctcgtgaagaaatcgttcaattaaccacagcagctacacctgggaaattgaatgaagttgtcggctatatgaatgttgttgaaatgatgatggcggttcaaaaaatgcgtgcccgtcgtcgtcctacgacgcaatctcacgtaaccaacgttcgagacaatccagttcagattgctgctgatgcggctgaaggggcgttgcgcggatttgatgaacaggaaacaaccgttgccgtagctcgttatgcaccatttaatgcagtggcaatcatggttggttcacaaactggacgtccaggcgtattaactcaatgttcattagaagaagcaacagagcttgatttagggatgcgcggattcactgcttatgctgaaacaatctctgtatatggtacagaacaagtatttaccgatggggacgatacaccttggtctaaaggcttcttggcctcttgttacgcatctcgcggattgaaaatgcgctttacttctggaacaggctcagaagtacagatgggatatgctgaaggcaaatcaatgctgtatcttgaaacacgctgtattttcttaacaaaagctgccggagttcaaggactacaaaatggttcaattagttgtattggtgttccaggagcggttccttcaggaattcgtgcaattttagcagaaaacttaattgctatgttgcttgacttagaagttgcttcaggaaatgaccaaaccttctcacattcggatattcgtagaaccgctcgtttgctgatgcagttcttaccaggaacagacttcatttcatctggttattctgcaacaccaaactatgacaatatgtttgcaggttcaaacttcgatgcagatgatttcgatgattacaatatcattcaacgtgacttgagagtggatggcggattacgaccagttagcgaagaagacgtggttgccgttcgtaataaagcagcaagagcgttgcagggcttgtttgacaagttgggcttgccaacgatcacggatgaagaagtggaagcagcaacctatgctcgcggatcacaagacatgccggaacgtgacatggttcaagatattaaagcagcgcaagaattattaacgcaaggtgcaactggtttggatctggtaaaaggattatcagaaagtggcttcgaagatgtagcgaccagcttgcttaatctattgaaacaacgtgtagctggagatttcttacaaacttcttcaatatttgatgcggattggaatgtaatctctgctgtcaatgacaagaatgattatgctggaccaggaaccggatatcgacttgacggttcagaatgggaaaaagtaaaagcaatccctaaagcaatcaatccgaaagatatttaaggaggagtaaaaatgacagaactaaatgaaaatcttttacgctccatcatcaaagaagttctaactgaaatggaagcgaacacaggagatcaaccagttgcgtttgaaaaacaagcaaagacagagcctgccgcatcatccgattggtttaaatctgtcggtgttgcccaaccaggaaactctcaggatgaagtagttattgcagtggcaccagcatttgcagaatcacaaacaactaatattcttggtgtccctcacaaagaaattttgaagcaagtaattgccggaattgaagaagaaggattgaaagcacgggttgttaaggtatatcgtacttcggatgtggcttttgccggtgttgaaggtgacaaattatctggttcaggtgtttgtgtggcaattcaatcaaagggaacgtccatcattcaccaaaaagatttgcagccgttatcaaatctagagcttttcccacaagctccgctaatcactttagaaacttatcgggcaatggggaaaaatgctgcaaagtatgctaagggtgaatcgccaaatccggtaccgatgatgaatgatcaaatggctcgtccaaaatatcaagcattgtcagcattgcttcatattaaagaaacgaaacacgttgtaatcggaaaaccagcagaagaaatttctgtaactttatagtgaggtgactagaatgaatgagcaatctatcgaaagtttggttcgaggaatcttaaaagatatgaataacggtgcaggaagtgcagcacctgaaacatcagtaagttctggatcagcaactgtagctgattatccaatcgcaaaaaatcatcctgattggatcaaaacaaaaacaggtaaaacattagatgatattacattggaaaatgttttgaatggctctttgacgccggatgatttgaaaattaccccacgtattttaaaagcacaaggcgaaatcgctacaagtgcagggagaaaaacgatctcaaataactttgatcgtgcgtctgaattgacggctgttcctgatgctcgcgtattggaaatgtataatgcgttacgaccttaccgttcaagtaaacaagaattgttagatattgcgaacgaattagaaacgcaatacagtgcaaaaatcagtgctgcttatgttcgcgaagcagcagaacattatgaaaaacggaaaaaactaaaaggtgataactaatttctagttcggaatttcaggaagaggagcaatgagtgatgaaacgtgtaattgggattgacattggaaattcctcaactgaagttgctttagttgaaattgataaccatcaacaagtccgattcctagaatcagcaattgcggagacgactggaataaaaggaacaaagaaaaatttatttggtatctataaggcgatcaatgaggcttgcgctaaaaatcatttaaagatcgaagaaatcgatttgattcggatcaatgaggcgacaccggttattggtgatgtagcgatggaaacaatcacagaaacaatcattacagaatcaaccatgatcggtcataatcccaaaacaccaggtggtttaggactaggggttgggacaacacttcgctttgaagaacttgaaaaaagcggcaagcgtgacacgccctacattttgattattgaaaaatcctttgactttgatgatgtagcacgtcaaattaatcaatttgtggcaagtggctatctgattactgctgcaattatgcaatctgatgacggcgttttagtgaacaatcgcttggataaaaaaataccgattgtcgatgaagtttcgtatatcgataaagttcctgtcaatatgctggcagcagttgaggtggctgagacaggtcggggtgtttctcaattgtcaaatccgtatggaattgccactgtctttgatcttgattcagaggcaactaaaaatatcgtcccagttgcccgggccttaatcggaaatcgttcggcagttgtcataaaaacaccaaaaggcgatgtcaaagctcggactattcctgctggaaaaatcgaaattactggtggaaatcggcgaaatactgtggggatttcagctggagctgaaaaaatcatggaaactgtatcagcgtttgaagtgatcgataacgtgactggtgaaccgggcacgaatgttggcggcatgctggagaaagttcgtttaaccatggctgagttaaccgatcgaccagtgaatcaaatctttattcaagatctgctggctgtcgatacctttgttccaattagtgtcaaaggcggattagctggggaattttcgatggagcaggcggtagggatcgcttcaatggtcaaatcggatcatttgcagatgtcaaaaatcgctgatgcgatccagcaggatttagggatcaaggttgagatcggcggcgcggaggcggaggcagcaattttaggtgcactaacgacaccaggaacatcagctccactagccattttggatttaggtgccgggtcgaccgacgcttctattattaaaaaagatgagagaatcgtagccactcatttggctggcgccggcgatatggtaacgatgttgattcaatcggaactaggtttagaggatgtttatctagctgaggatatcaaaaaatatcctctggcaaaggttgaaaatattttctacattcgtcatgaggatggctccgttcaattctttgatcaaccattagatccgtccttatttgctaaggtcgtcgtggtaacacctgatggttatgttccgattccaggcgatgattccattgaaaaaatccgcttggttcggcagacagcaaaagaacgagtctttgtaacgaatgcgttacgagcattgcgaagagttagtccaacgggaagtattcgcgatattccatttgtagtcattgtcggcggatcggctttagattttgaagtaccccagattgtaaccaatgcactctctcattacggattggtcgcaggtcgcggaaacattcgacaaattgagggaccgcgaaatgctgtggcaaccggattgattctttcatatttgagggaggggttcgatggagcttgagctaaatgttcgtcctgtagtcttgatttatcttgataataggtcatcgactgaggatattcaatttgttctctatggtatggaagaagaaaaaatcccttatagcttagaacaaaagaatttttcaacagcgacagaggctgcttatgttgcggcaaatacctcatcgttaaatgttggaatcggctatgtaaacaatgaagtcgttcttcattataaaaatttggcaccagaaactccttatcaatcgattcaacgagttgtaacttgtccaccattgattttaaaaaactttggtgggaatgcggcacgtttagtaaagggtgtgccattcaaatcaattgatccaatggaggtgaaagcatgaaacaagcaattggcttagttgaagtaacaggcttagctagtgcaatcgaagtatcagatacaatggtcaaggtggcgaatgtagaactcttgggtgttgaaaaagcgaaaggtttcggttggatgaccgttaaagtggctggagatgttggggcggttaaggcagcggttgatgctggtaaagccaaagcggtccaaaataatgtgtatctttcttcactggttatccctcgtccagcaaacaacttagaagacttcttctttaaaaaggaagaggagaagattgatgttcctgctgagacgattgaacagccagaagcagtgatcgagtcagttgaggaaaaaccacaaccgattgaaaaagtggaaattgcagagacgattaaagaagaaccagtgaaagaagttccaatagaaaaagctccaatagaagaaccgcttaagaaagatccggtagaagagaaactaatcagaaaagaaccgatcaaagaacaacccaagaagaaaaagaatccacctaaaggatcgaaaaaagcttcagattcgaaaaagaaaaagtaattacagacgttaatgtgatatctgtccaacgatgcacagatttacagaagaagatgaaatcatttatcgtaaatgataaaaagttttcactagtttagttggatgatagacgaatttaggaggaatagacatgaatgatgcattaggaatgatcgaaacaaaaggcctagttggtgctgttgaagcagccgatgctatggttaaggcagcgaatgtaacattagtaggaacagagaaaatcggttctggcttagttactgtgatggttcgcggagatgttggagcagttaaagcagcagtagatgctggctgtgcagctgcagaaaaggttggggaagtggtttccgttcacgtaatcccaagaccgcatcgcgatgtcgatgacattttagtacctaaggtaggcaatgaataattacagcattgaggaaattagaaaaattgttcgtgaagtgttattggagatgcaagcagaaacatttccaattggcatctctaaccgacacatacatttaacggaagaacactttactattctatttcctaatgaaacactcgagcctttgaagcctttgaaacagccgggggaatttgccgcaaagcaaaccgtgactttggttgggccgaagggggaaattcggaaagttcgaattttgggaccattgagaaaacgatcgcaggttgaaatttctaaaacagatgcacgaaatttaggagttcaaccaccaattcgcttatcaggaaatttggatgatgcggttgaaatcacgttgcgcagtgaggcggcagaagtaactattccagcggcaatcgtggcaaaacgccacattcatttgaatgatcaggatatggaacgaatgggcttaaagcagggccaagtggtttcagtcgaaatttttgaaggatcgcgaaaaacgattttcaatgatgttgaattgcggccaggaaagaattttgttttagaaatgcacgtagatacagatgaagcaaatgctgcagatattcagccaaatacacgaggacggattattaaagaataatccaaaggaggaagtatggaatcaatcgaaaaagccaatcaattattaacctcttttcatgaacttgtgaatacgaagcaagcgcaggagtttgatcctgaagatggctataaagttgggatcgatttgggtacttcctctattgtgttggttgttttagatgggaagaatcgaccagtttttggagccttcgaatatgcagacgttattcgcgatggattagtcgttgattaccaaaagtctgttcaaatcgtcaatcgtttgcgggaacaagccgaggaaacactaggttttgccttgaaagcagcatcgggggcgattccgccgggaacggttgggaacaataagcgggtggtggctaatgtcatcgaaagtgcgaatatgttagctgatcagctagttgatgaaccaacagcggcggcattagttttaaatgtcgatgaaggagctgtggtagatgttggcggcggaacaacgggcattagtatttttgaaaatggacagccgatcattgtagaagacgagcccactgggggaacgcacatgaccttagtgattgctggtaataatcgaatttcgatcgaagaggcagagaagattaaacgtgatcctgctcgtgaccgagagaacttcattatttgccgtccagttattcagcgtatggcgaacattaccgcaaatgttttacgaaaacatccaacggaacctatctatgtagtcggcggcgcttcttacctatctgaatttgaaaaggaattttcaaattatttaaatcaaacagtatttaaaccgaaatatcctcaatttgtaacaccaattggaattgcgatgtcttcttcgccaatcgttgattgagcaagaagcggtagcagtatccaattgaacagaaacgatatctgcactaagaattgggagtaagaatatggacgagttagttgagcgtattatttcaatcattaatcagcgagaacacaataccttatttctttcttgtcgtaccccttcccagataaatcaaggaattaaaggctttttatacaataagcagattcatttgagtgaagtagatgtcctatttctagagcggttcataaaaaaagacagtgacgatcctttagtgaggtggctgtatcaaagctataactatgattgtcacctgacgtttgaactggctttttcaaacacggatttgattccaaatgaattattcaacgaatgcagtgtgacattgcttaacaatcaaggcaaacaatattttcaatttcccaaaaaagtgattacctaccaacaagtagcgatgctgacgcaggaggatattctgcttttggcatccaatcaactcattacagatttggcgagggagcgattgcaggaaaagaaagtcattgttgtagaaaggagttcaccctatgctgatggcaaaagtagttggaagtgtagtttcgacccaaaaagatgaaacattggttggaaagaaattgatgattattcaaccgattaacgctgagcgacaggatattcgtttccaacaggtggcggcggatacagtaggggctggcattggcgattacgtcttattgaccagcggatcttctgccagaaaactgttttcgactccttcagatgctgttgattatgcaatcgttggaattattgacacgtttgatttttagggagctgaggaaagtatatggcgatttatacaaaaacgggagataaaggaacaacaagcctttttgatggaacacgagtagaaaaatcagatttgcgcgtggatacttacggaacgtttgatgaatgctgtgctcaagtcagtgtcgctcagaaattggcgaaggattcagaaacaattgaacacttagaatgggttcagcataaactattccaattaaacgcagaaattgcaacaaaacaagacatggcaaagctggaagcgaaaagtacgttggttggagaaaatgacatccaccaaatggaagcgtggatcgatcagtatactaagcgtttaccagaattgcatagttttattttaccgggccaaacactgtcagctgctcagttacatgttgctcgagctgtttgtcggcggggcgaacgattgctgacggagctgtccaagtctgttgatatccgggaagaggtacgaaaatttgttaatcgcctatctgattgcctgtatatctttgctcgtatggaagatcaatgtgagactgaaaaacagctgattaatgagatcctgcgtcgttaccttgaacaaagtggatcacaaatagaagcgagtaatttagataaaaattatgcgatctttcaagcctgcgaagcacaagcattaaaattgggcgtcccagtatcaatggcgttagtcgataaggcaggacacctgttcagcttttatcgaatggctggtgcgttgctggttagcgaaaatttagcacagaaaaaagcctactcagctgttgcgatgaagaccgacacgcacaagctaagtgaactggttcagccagcagcggatctttatcagctggaagcattgactgacggacaaatcgtcacgtttggcggtggatatgtaatcagagatgcagcaggtgaagtgattggcggcttaggaatcagcggcggtgcggtcgtggaagatatggcgattgctcaaaaaggtttagagaagttgaaggagatttgacatgcgtgaagaagaaataaaagaagtcatcaaaaaaattcttcaggaagctcaagcaacaacatctcctatgaaggaatttggtgtttttgagacagttgaagaagcgattcatgcggcaaaatttgcccaagaatgttatgagaatcaaaccctagaaacaagaagaaaagtgatcgaggcaattcgcaatggcatgcggccatacgttgaaaaaattgctcgcgatacattagaagaaactggaatggggcgatacgaggataaggtccaaaagctgcagttagcgatcaataaaactccaggtgtggaagatctgcgaacggaagcattaactggtgataacgggatgaccctgtacgagttatctccttacggtgttgttggagctgtgacccctagtacgaatccagccgaaaccctaatctgtaacgcaatcggtatgttagcggcaggaaatgcgatctattttagtgtccatccaggggccaaaagggtttctcgctgggtcgttagcaaaatgaatgagctgatttatgaggcttgtgggattcaaaatctaattgtgacgattactgaaccttcgatcgaagctgcaaaagaaatgatggagcatccggatgtaccgttgctggcgattacaggtggaccaggtgtagtacggcaagcgatgagaagtggaaagaaagtcattgcagcaggtgaaggaaatccaccatcgctagttgacgagacagcaaatatcgaaaaagctgcaaaggacattgttattggtgcatcgtttgacaataatattttgtgtacggctgaaaagagtgtggttgttgtggaccaggtagcggattatttaattctacagatggagaaaaatggtgcctatctagttcaagatgaagcggtcattcaaaaaatgatagatatgactatcatggagaatggagcccctagccggaaatttatcggaaaagatgctaactatattttagctgaagccgggatcaaagtagattttgacgttcgggtcatcattttgcgggcggataaaattcatccgtttgtagtgaaggaaatgctgatgccgattttgccagtcgttaccgtcagcgattttgacgaaggattaacgactgcactgcaaattgagaatcgacgccatcatacagcgacaatgcattctcaaaatgtcggtcggatgaatattgcagcgaagaaatttcaaacatcgatttttgttaagaatggttcatcgtttgccggtttaggctttggcggtgaaggtccaacgacctttacgatcgcaacgccgactggagaatgtaccacctccgctcgtgattttgctcgtaaacgacgttgtgtgttaactgatggattctcaatacgataaaggaggcgttctttttgaaaaaatggtcaatgaaaccagaaatttattctggctttgccagtctggaacgattgcagcaatttgaaaaagaaaacctctgctttgtctgtgatccttatttagccgaatctgacagcttaaaacgaattttaggttatgtaaaacgaaccaatacggtcgagatttattctgatattataccggatcctccgattgaaacggtagtagatggaatcgaaaaaatgacaaaacacaagccaactgtggttatcgcagttggcgggggatcggcgattgatacagcaaaagcgatgcttttcttctacaaacgaacgactggcaataaagtgaagcgatttgtggctatccccaccacaagcggaactggatcggaagtaaccagtgcttcggtaatcaccgatacacaaaacaaaataaaatatccgatttttcatgaagcgatcattcctcacgaggcgattttggatgcaagtttggttatgtctagcccgccatcagttacggcttttagcggactagatgtgttaacacatgcacttgagtcattagcttcagtaaatcgaaccaattacacaaacgcgttagctgaaaaagcgacggaattagttttccagtttttgccgacatgtgtgaatcaaggaatggagctggatgcacggattcaaatgcatgaagcctcgactttggctggtttggcttttgatgctgcgggtttgggtgtctgtcacgcgatcgctcatcaagtaggagcgaatttcaaggttcctcatggattagccaattcgatgctgctgccttacgtgattcaagcaaacagcaaggataaagaaaccagaaaaaattatgcaagaatttctcgtaagcttggtatatgtccgccgagtttgccggaccatttagcagtttcaaatcttgctcaggctgttcaacaattagcgatcgaatgtaaagcaccgattaagctgaatagttttggaatccaggaagaagctgcattatctgctgaggatgttatcgcaaataatgcattaaatgacacgacatttaaaacgaatccgattcagttttcagcggaagaaatcaaagatatttatcgaaatatcataaaataatcattattactgacaataatttatcactttgtaagggagaaaaccgttataatgaagatgagtaaattgtcgggtgtcagttgcgaaagtcagaaaaaagaataaggaggtctcattatgaatagtcctgtatttggtgaattttttggtacggttgttctgattctttttggttcaggtgttgggtgttctgtcaatttgaaaggtactttggcaaagggcgtcggagctagttggttatacattgcaatgggctggggtgttgcggttatgctgggtgttttagctagtggacatttcggttctccaggtcacttgaatccggcagtaacgattggatttgctgttgctggttcctttgagtgggggcaagttgcaccattcattttggctcaggttgctggtgcttttgtcggggcattgattgcagcgatccacttctggccgcattttcaaaatacaacggttgaagaagggaacagcgttgggatttttgctactggaccagcaattccaaacacagcattaaacttagttagtgaaatcattgctacttgtttcttcgtattagcgattcaattaatgccagctgatattcctcctggtttacaaccattgatgcttgtcttcgtcttaatcggaattggtctatcactaggatcgaccactggttatgccatcaacccttgtcgtgactttggtccgcggttgatgtatgcgttgatgccgattccgaataagggtgatgccaattggggatacgcatggattccgatcgtgggtccaatcattggtgcatgtattgcgaccttgttagtgaaaggtataggataaattataaaaaaggattcaaatgaattcgtctgatactcaatgagtagcggacgatttcattattaaggggggaaattatggcaagtaaaattatgtcgatcaatgccggtagttcctcattgaagtttcaagtattcgaaatgcctgaggaaacattgttagtcaaaggcttatttgaacgaatcggattagaagaggaaatgggtttttcttattcattgaaggacgcaaaagtaaaaacgactattaaaggaaaaacccatgaagaggcaatagagtttctgttgcattttttactggaaagaaatgttttaaccagtttgcaggagcttgctggcgtagggcaccgtgtggctcatggcggagaagatttcaagaaatctagcttggtggatcgggacgcattacaaaaaatcaaggtgctagggaaattagctcctttgcataaccctgtgaatgtggtcggtatcgaggcattgcaaaaggatttgcctgattgtccgcaagtcgctgtttttgatacctcctttcatcagacgatggaggctaaaaattatatctatccattgccttatcgattctatgaagaggatagcgtccgacgctacggcttccatggaactagtcatcaatttgtggcgtctgaagcagctaattgtcttgaaaaaccattagagtcattgaagattatttcctgccatttaggaaacggagcaagtatttgtggaatcaaggacggaaaatcggtcattacctcaatgggctttacgcctttggcaggtttaatgatgggcacgagatgcggtgacatcgacccttcgattattccatttttgcaaaatgagaaaaatctttctgctaatgatatggataagctaatgaatgcggaatcaggcttcaagggcatcacaggctttagcagtgatacgcgagatatcattactgaggcagaaaaaggaaatgacagagcaaagcttgcgctggatatgtttgctagtcgtgtgaagcaaacgattggtgcttatgcggcagagcttgacggtgtggatgtcttgattttcactgctggaattggcgagaattcttccgtcattcgagaaatggtttgtgagaatttaaccttcttaggaattgagctggacccacagatgaaccagaaaaataacagaagaatcagtactgagacctctaaggtagaagtgctagtagttgaaacaaatgaagaattaatgatcgtcagagatacgtatcatttgatttaattgattacttttacagaaaacgacctcctattctaaaagaatcgggaggttgtttctttggattgaagcagacagaaagttattggtaatcaaacgcgtgggaaatcaaaaaacgactttttagaagaaagcattgaatggtagaataaaagcgataacgaaagagaacggaggggaatgattggataaaaaagcccttgtaaataaaagcatcgactatattttagctcatttagaagaaccgatctcaatcgaggatgtcgcaaaccagctatctttttcaaagtattatttttgtcgtatgttcaaagaggagactggcgaaggtgtttattcttttatcaaacgtctaaaagtcgaacaaagtgcaattgatctaaaacttcaaaaggataagcgaattactgacatcggattggattacgggtatagtgcgtctaattacagctccctattcaaagaacattatcagctttcaccaaatgactatcgaaaatcattggaagcgtcgacgatttcaaatcctttctatcctcagaagcaagaagttttggacacctttgaagattatcagaagaaggttgaattaaaagaattaaatgatttatatgtgatttatgagagaatgctgggcaattatgcggaattgaaaagtagctggtcggcgttggtcgaagagaatgcctattatgatgacacgactgtgatgatcgaaaaattctataatgatccagccgttgcgatcgatggtcacagtatttgtgatctatgctttacgcttaatgaggaaatcaaagagaaaaacactatggtgataaccggcggcacgtatgcgatttatccatataaaggtcagatagaagacattttccgagtgatgcagggtttttttaggatctggcttcctgaaagcagctatcagatgcgtgaaaaatatgggttgacgatttatcgtaaaattgattgggaaaatgattatgtacagttggacatgtgtattccggttgaatagagcaagaattcagaagtcaacaagaagattcttttctacaataggattatctaaaacagataatttattgtagaggagaatcttttttggctctaagtcaaatcgtgttgttctcattaaatcactgaaaggaaatgcttcggcgtttccttttttctttttgtttttttgctcaaataatgtcgcaaagattctgttgaatcagaattcgcatacgaaggtggcgaaaggttctaaaaccgaatgccactctcttaatcactttaatcaagttattcttcccttcaagttttccgttcgaataggggtattttaacgcattgataatcgcttgtttgtgtttgtttaagtaaagaatcgcttttttaaatgctggatcaagcatcggaggtaagtgatcaatgcgttcgtaaaagtccttataatctttggcatcaaaggcatccaacaaattttgatacacatcatagcttgtccgtaagcgctcgtcaatcgataataaataatccaatacttccgattccgtcaggtatttccgttggaaaagcgggtattgtttgagcgaagaataattaatttttctattttttttcagaatggttcgccaatatttcttaagcttgcgatactttttcatggcttgcgggtcgctctttttcaagtgattcatggtttttatccgttgtttgttaaacgcacgattgagttgttggatcacatgaaatcgatcaatggaaatccgagcatttgggaaaacgacctttgtcacagaatcatagcccgcattcatatccatcacgacatgagaaacgtttttccgtgcgtgataagtaaaacgcatgaaataggcgatcagcttgaagcttcttcgatcctctaaaatatcaaagattttccccgtgtccgcgtcactgagaataaaacacatggcgccctgacagtccttagttcctttgaattcatcaatcaatagatgtttgggtaagtaattgggcttcagtcgtggttcttcaaaaaaagaatccaagacccgttcgaccgttttagcggaaaccaagtaacgttgagcgatatctttcatcgaaattttcttctttaaatcaacagcgatcgcaaacttgagcgcttgggagagataacagttttctgcgacataataggttttagctgaaaaggtatggtgacactgtttacaataaaaccgttgtttatagagatgaagataggtagacacctcttgataagggagtaattgaatccagctatctttgtagccatgatggatgacggagtcgtagccgcaacactcacaccgaggagacggatagctcagtcgaccagtaaagacggtggccattctgtcatggactttttcttttgaaacggcgtctttaggaaaagtaatgttggaatcatgaatatttaggatttgtttgatggttttgtctaggcaattatctttatatttgatattcttaatactggacatttggttcgcctcctatgattgggttcagcgatttaattataggacaaccaaatgtctttttgtataaaaaaatacttggtgttctcactcagaaagagtaacaacaccaaatattatagaacctctttttttgaaaaaggagtgagagtatggaaatggtgattccaccttatactgggcgataactattttgcccagagaggatgagtgaagtgcgaaaggtaacttggacagtggcatgcttaaagacgcccacaatcattcggcattgcaagaaatgcaatgaggatactgaattttcctgttcggaaaggtttcggatcaatgctcaagggaaatatttggatgtttggttaatctataattgtaaaaaatgtaagactagctggaattcaaccattctatcgagaattcatacgaataagctagactctgatttgttggctctttttcaagagaatgattccggactttcaaaaaaatacgggactgataaaaccaccttaaagaaaaatggtgtagtgattcgaacgattgactacgaggtgttgggggatctatttgaactagacgaggaagtcgttgtaacaattcaatcggattatccattggacatcaagctcttcaagattttgaaagaaaaattgaacttatcaaacaatgagctgaagcagctaatttcgaaagggaagattattggcttatctaatgaatgtttcaaagagaagctgcggagtcgacagacgattctatttaatcttaaaaaggagtcaatcaatgcctaagatgaaatcccatcgtggactgaaaaagcgagtgaaattaacggggaatggaaaaaataaaaaagggaaaagtcgctcggcttatatagataaggcaaatttgcccgctgttaaaaaaagattactaagctagatgaacacaatataaaactctgcgaaaaaatcatcgaatgattctcgcagagtttttctttctattgtagcaaactgtcgatcagttctggacgcggattggataagacgattttattaatgagcatcgcttgatcttgtgcaccatttgctccagcctcgacagcagctttgaccgcggcaacatctcctgtaagtacaacgaaagattttccagcaattcctgtcccaagttgaatcgctaagagctcaacgtcggcggcttttacagcaaaatcagcggcgatgattgagcctgttgctgaatagtattccaaaacaccgactgcatgaactttttctggaacttgagccatattgatggcatgaatcactgccggattaatacgaggaattaacagctctccaacgacatagcgccctcccagttcaacaccaacttccatagagcgttcaatcgctgccacctgtccgcagatcataatatagtattttccaggacaactcgctcgggccataatcaaggtggcatctgcggcttttagcatgtagtcaacgacttcgattcctttcgcgatactgtttaattccaaaaagccaatcgtatccattattttcattagttgtcccttctttcaatagtaatactagcgctaacagctgtaacaatgccatcaatgctggcatgaatatctgcacctaaagctttttctggctttctgccgatcagctctcctgctctgactcgatccccgatctgtaagactggttcgcaaggagcccctatgtgcattcttaggggaattctaacctgtttcggttcatatttctgaagcttttcgatagtaaaatcagcatactgcttaagcccatccttcaataagattttcactggcggaaccagctgatagtctcgcataggtgaaggcgtgagtggccgttcatctttcttataacggatacctttttccgctaaacgttgtttgacatacttatttacttgccttggtaaaagtcccattggacaggcaattgtttcgcaaattccacattcgcagcaaagcagcgcttctttccatattggatcatcatcgatatcatctgggacatcagtgatcgtcaaatgccgcatcacacggtgaggatggatcggatgaccaatttgataacgaggacaaagctccgtacataagcgacattgaatacaagaagaacgtgctttattgatcatttgtggaatttctttttcatggagttcataaatgaaatcacgtttttccataataatgattccagaagttgttttcgtgacgacttgttgagagaaatcctcttttactccggttttccccatcatcgggccgccgttaataaacatgaaatcatttagtgtggtgccgccggctaaagctaggcattcatcgaaagaagtaccaatgggaacttccaaaattttcggctctctgacagcaccagtgatggtgagcagtttatgagtgacgttttttccctgtcgtgcttgatagatattcagcatggtggcgatgtttgagataacacagccgacctcaatgggaattccaccaggtggaactgttcgcccagtgacctcatagaccataatctgttcatcgccagctggataaaagttcttcattttgaagatcgtgacaggaacccctaattcttgaatggctttttcaagggcggcgatttctttcgtatagtaggccttagtcgctattacgatatgttgcgcctccagcatttcaccgactgctgcgatggcctcaacacattccttagcatagttgttcattacataatggtcggttttaagtagcggttcgcactccgctgcgttgataatgaaatattccgttttggtgttgtacttaacagcagtcggaaagcccgcaccgccgcaaccgacaatcccagccgcagtgatttgatccaatagcatattcgttcctcatttctttagactaaaataagagcgttttcatttgttacgagtaattgcgttaaaaaattgtttcgggtggtacggatcagctggcaggctttctcaggtgtggttagcagctgtctgtttttcaacagtttctgtgccagcatcatagagagtcccttggctaaaaagctttcttgtggattgattaaactgtcaaaatcagggaattctcctaaatttgcgattcgattgatgttagccattgccagataaccaagtgagtcttgaagaatctctaaaaaccgttcctgttgatcacttttgatatgatcagaaaaataagtgaagtatgtttggtacgtatccttgattacctgcagcaaatccgaacacatggattcattacctctaatagtgaatgccgaatattgtgataggatatttgccaagaagtacccaatatcatacgaaaaggggcccgtcatggtgtattccatatcaatcaccttaaaggatgtttgtgaaacaaaaatattagaagaatgaaaatcaccgtggatcaagcattcatccttactagatacgcgttcaatcaattcttcccaatcccgcttaactgcggcatcctgcaaaatagtgtccaagatgtctaatagtccttcttgatgggaagtcaacgcttgattcgttctaaccggcggcttcaaaataaaatcggtaatgatctttcgcatgtcagcatttttaaaatagcttgctaaggcttgccaatgctcttcagacaaccgcagcttagaggttgctacatgcgttctagcaaggtattctccgacttgttttcctaaccgtggcagctgttctcctcgacaaagggcgaaacgcagaacggtcaggtaagaaagatcctccataataaataaatgtgccgctgggtccgcatagtaggtttctggaaccatctgaggagctaaacctgcccgcaattgataagtcatatattccaaataattccgcttagggtcaattggagcaagggagataccgctggaaatcgtcttttttgaatgtttggcaatgtattttttatttccctgttttagaacatagagataatttaaatagccatcaacgtatttgtctttttcgttggaaagaacggacacgatgaggggactagtttgatcaaaaagtttggttcgctgaagcaaataatcggcaagagtgtgctcactaatctccatcgttttcctcctgttcgagcaatcgttaatctcggaatttcatgcgttgccaacatgtcagtggtattcgcagaaatcctatcctatcaataattttatcgaatcttatagtgaaaatatataataaaaatatgcacactaaaggctttccccaaaaagcccttgagcgcttggatcagagggaatcgttgaaaaaagtgagcaaaaaaatgcaataaaaaaccgttctcgaaacgaaaacggttagagtacatacatagattcttcaaaatcctccacgtaataacggaaattttttcttcctcggcgaacgattttgtgcccttcagcttcaagtttttcgatctgggcctccacgccgccagggaatttcgggttgatttctcctttggccttcagtgttcgccagtaaggtgtgggatcatcgtcacgctgctcgctagcccatgctgcgatagagatgaaggcaccggctgtgatgggttcggtaaagtcgccatcattttgttttgccagatgctctctgatggcacttgttgtgataattttgccaaaaggaatttgtttcatgatggcatcgtaatccaatggtggggcaaagtacatttttgttccaccatagcgtttgatcgtggcttcatcggttacgatctgcattttcggcattcctttatcttcgtttagcatggcattaaaatccttttgatcctcatttgccatgagattcgcctcctaacttctttatgaataaggtagtcattacgcgcgcaattcctacctctagtgtaccgagtttaaaatggccctgcaatgagacagtttattttttttgaaaaaaagttgcgacgtttttatctaatgtctgagtagttgagacaatgatcaattcttcgactgaggataaaagagcgcaggtcaaaagaatgacaccaaagggcttgattgcaacgattaataatacaatcggcgataaaaagagcaatagaccggtcaacttatttaagtaagtatgcagacttgtgaactgatgaaaacgaaaatagccgatcacataggaaatacagcgaatgagcgctactgttaacgcgccccaaagaagaaaagctggaagcgtgattgtcagtacaacctttgcgatgacgacgagaaagaaaagtagatctgccaaactgtctaaaaacgtaccaaaggggcttgtccagttcattttgcgggctaaccaaccgtcaagcatatccgtcagtccagcaaaaaaataaagtggaaagaaccatttatttggtacaaagagaatcagcagcgaggcgaggattcgtaaacaggtaataatgtttggaatgaatttcatataggactccttcttaaatacaagcataaaaaaataatttctattatttcgtctttactaaccctactgaaggtagtggatgaacaaataaagtaggatcttttcagaaatataacttaactttatcatgatcttagctagtttgaaatcaaactgaaatcagaatgcaatgattttgtgctatttttgataaaaagggtaaagaggagtgcgaaatgacaacaacattgattattgatcatccctggaaggaaagctttaatcatgctgtcttgaataagctgatcactgggttggagcaagatcagaaaatctatcaggtgattgatttaaataaggacggctttgatccagtcatgaagaaagaagagttggcagtttatcaaagcggttcggttttagatccattggttttgcattatatgagtttattgaaggtgaccactcagctggttttgatctttccgatttggtggtatagctcacccgcaagtttaaagggctttcttgataaggtgctgttaaatgaattcgctttttttgatggtggaaatgggattcagccgcttttgtcgattgattcggtggttgtttttaccacctctgaccaaccaacagccagcttggagcaacggtgtacccgcagttataagcatcagctgacgacgacgctagaagatatcggcatgcgcaatatttcctggtaccatctaggagctgttaaaaatactactgaggaagaacgaatcgaatatttagattcggtttacgagaaattataaagaaacttcgaagctctctatgtcagaaaagcctcgaagtttttttattttttagttagtttggctaatatagcgtcaatttgagtcagttcttctttactaaaggctaaatgatctagggctttcaggttgtcttctaattgactgacgcgtgacgcaccaatcaagacactcgtaacggtgggctgacgcaagttccaggctaatgccatttctgccaatgtctgcccgcgtttttcagcaatgtcatttagttgtttaaccacctctatggtagattgaacgttgtcttctgttaagaaaggactatctgaacgatgcgcgcgggaatcttcgggaataccgtgtaaatagcgatttgtcaacaggccttgcgccaagggactgaaggtgatcgtacctattccttcctctgctaaaacatcggtcaatccatcttcgatccaacggtcgaacatattgtatcgtggttgatgaatgataaaaggtgttcttagttcttggaaaatcttgctgatttcagctgtttgttccgcggaataatttgaaaccccaacgtataaggttttcccctgacgaactagctgatctaatgccagcgcggtttcttctaaaggcgtgtcaggatctggtcggtgagaatagaaaatgtctacataatcaagtcccatacgcttcaagctctgctcacagctggcgatgatggactttcgggaaccccattcaccataaggtcccggccacatataatagccggcttttgaagagatgattagctcatcacgatatggaaacatgtcttccttcaagattcgtccgaaattgatttctgccgaacctgcaggtggcccataattatttgctaaatcgaagtgagtaattccatgatcgaaggcggctcgaacaatggcccgctgattgtccaaagtgtcaacatcgccaaaattatgccacaagcctaaagaaatcgcgggaagtttcaaaccggattttcctaaacgtcgataatccattttctcatagcgttgttcatttgctaaatacataattgacctcctaagaaacaaattttcacgttctttaaaacgcttacttctgattatccgcttttttcaacgattgtaaagaaagagagctgattataagtgagacagaaaaaaattttttataaaagtgatggtctttttatgatttattaggtgattataagaaattcatcaaattctcaaaagtttctttaagttttccctcgaactccctgagttggtcttgcgccagtttctttttatcgttacactggctaagatataaaagaaagatgaggattattttttatggaaaacgaaaaagttacacagccgaataaaagcgactggtttttacgcttcatcaaagggatgttcatcggctctggatttattttaccgggtgtcagcggcggggcgttggcagcagtatttggtatttatgaacgaattatttcttttttagcccacattactaagaactttaaagaaaatgttttgttctttattcctgttgggctgggcggattagccggagttttcgtgttatcctttgctgtcagctttttacttggcgaatttgaaacgatcatgctatggttcttcgttggctgtattattggaacggttcctgcgttatggaaagaagcgggaaaaaaaggtcgagataccaaagattatataattatcgtcgttagttttgtggttggtttcttattcttgtggaagggctccagcttgtttggaactgtggatcaaaacttctttacttggatgatcgcgggggcattgattggattaggtttgatcgttccgggactaagcccttcaaattttttggtttatatgggtatgtataaagcgatggctgatggctttaaaacggtggatatgggtgtaattataccgattggaatcggtggattggttacggttttgagcttatctaaagtaatggactgggtgttcagccatttttatgcaccgatgtatcattttattttaggaattgtttttgcttcgaccgttatgattgtgccgactgattatagcggaatcggcatccttggattccttggttgcgcggttttatgtgttttaggcgccgctttaggatggtggatgagccgactggaagaacgttacgttccagaagattagaaaaaaatttgaatttagggcttgcatttttgatgagaagtctttaatatggtgttaagcatttggaatagtaataaattttatcggcagcagagagttgattcaccgtctgaaagatcaacacgccctctggaatttatgaacctaccaaagttgattgctgtgaaagcagcacgcgactctagcgttattggagctgaaagttgggtcaacaagttttgaccaagcaaggtggtaccgcgaaattatccgtttcgtccttacaattatgtagggatggaacggtttttttatttttattttctaggaggatgcatgaatgacaaacttacaaaaagaagatttttctaaatggtatttacaaacaattcaaaaagctgacttgatggattattcacctgttcgtggctgtatcatctttaaagctgatggttgggaattatgggaacatattcaagaggactttaataaatacctaaaaacccaagatattcgtaatgtttatttcccaatgctgattcctaaacatttcttggaaaaagaagaagagcacgtagaaggcttcgcccctgagttgccttggttaacaaaagtaggcgatgaagaattggaagaaccatacgcgttacgtccgacatctgaaaccttgatcggagatgcattctccaattggattaattcttaccgtgatcttccttacgaaatcaatcaatgggcaaatgtcttccgctgggagaaaaagaccatgccattcttgcgtacatcagaattcttatggcaagaaggacatacggctcatgaatcagaagaaaatgcacgtgagcgtacaatgggtgtgttagaagcctacgcaaccttgatcgaaaatacgttagcaattcctgtttaccgtggacaaaaaacaccatctgaacgttttgctggtgctgtagacacttattctgtagaggcaatgatgcgtgacgggaaagccgtccaagcaggaacgtctcattaccttggtcaaaactttgcggaagcctttgatattaaatttttaaaccgcaacaatgagcacgaattcgtgtatacaacttcttgggggatttcgacacgtttgattggatcattgattatggttcacggtgacgaacaaggattagtattaccaccaaaggttgcaccaacacaagttattttagtaccagttggaccttggcaaaagaacccagaaatcttagagcgcttgaaggaattaaaagtagccttagcagcaaaaggtttacgtgttcgtattgatactacggataatacaccaggctacaaattcaacgagtgggaattgaagggtgcagcattacgtgtcgaatttggcccacgtgatctagaaaataatcaagcagttatcaaaatgcgtgacttagatgataaggaatccgtttcattagacggtattgaagattatattgtagaacaattagatgtcatgcaagaacgtttattcgaaagtgcgcaaaaacgttacaccgaaaacgagcacactgacatcgacacattagatgaattgaaggcccatatcgaaaaatcaaaagaagctggcgaagttccaggctttgtcttgatcggatgggacggtaccgaagaaacagaagctaagatcaaagaagaaactggcttcacgacgcgaaatattccatttaacccgcctgttgaaaaaacagtcgacatcgttagtggaaaacctgcgaagcataccgtttggattgctcgcgcatactaatttgaggaagtccgcaacagaatcactttttatataaaatgagtttttgcaattactgttaaatcaatcagccaccagtaagcaggacggtcgggaatttggtttcccaaaaaggttgatctgtgcggttatattcttagagcctgaggcgatcaaagacatttgatcggctcaggcttgtttttgcgagttctgcttttcgcagtgttttcaaagagaaaactacataaatgttttgggaatagttaaatagaaaggtttagcagaatcgtatgcgtacgaagataaagtattttttccgctttttggaaaaatggcttctttacttgtgagctagctgtcagtctaacttttcgcagtcgctcaatgttggacgtgctattaaattatctggacccaatattgatagaaaagcttattagaatcgaatactatctaacgattgaaagtgattatgtgatggaagcgactatcttttaatcactttttttgtgggtagaatgtcaacgtgtccgaagcctgtttgcagctagttggaatcaatgctattgttgaatgaaataatagacagaggaggccaatgatgaaaattgttgtactagatggttatgcgttaaatcctggcgatttaagctggcaaggttttgaagaattcggtgaagtgactgtttatgagcgcacttcttttacggataaaagtgaaattattgagcgaatcggtgatgcggaagcgatattgacaaataaaacaccgatcgatgaggagattttggcagccgttcctcaattgaaatacattggagtcatcgcgactggctacaatgtggtggatattgaagccgctgaacagcggaatataccagtaacgaatattcctacttatggaacggatgcggtggcgcaatttacttttgcccttttattagagattgccaaccaagtaggtgtccataatgtttctgtacatcagggagaatggcaagagagtgttgacttcacgtatcagaaaacgcctttgatggagcttcagggcaagacgttgggtctgataggctacggagaaattgctcaagcgacagcggtaattgctcatgcgtttaatatgaaggtcatctattggaatcaccgtccaaaagaagctcaggctgaatgggcgcagcaggtttctatggaggagctttatcagcagtcagacatcatcagtcttcacgtaccgcaaacggcagagactcaagaaatgattaaccaagaaagtatcgcgaagatgaaggatggcgttattttgttgaacacagctcgcggcggactattagacgaagcagcggttgctgaggctttaaatgaaggaaaaatatttgcggcaggtgtcgatgtggtctcaagcgagccgatgtcaaaggacaatccattactgaccgctaagaactgtttcatcactccgcatattgcgtggcgtccgctagaaacgcgggaacgcctgatggctattgcggtggataatttcgctgcttttctagccgggaaagagaaaaatgtggtaaataaaagagcatgacggataatatcatgctctgtttcttctatttaaatagttgatctattttgtcgtagtcttcagtggataatcggatatcgaccgctttggcatttgccgctacttgttctggacgttttgcgccagggatgacgacatcgatttgtggatgcttcatataccaagcaagaaccaattgtgccacagtcgcatcgtaggctttagcgattggttttaattgatctactttttcgatgacctcagtgaagcgttcgccattgaagtcaggtcgtttgcttcttgggtcggattcctcaaaacgatcttctttttgatattttccagtcaataagccggaagctagaggaaagtatggaacaaagctgattctcttttctttcagataagggaaaagctcttcctcaagttcacgatgaatcaagctatagcgttcctcaacaatatcgacataaccgttttggttggcttcttttaattgttctaatgagaagtttgaaacaccaatcgcacggatttttccttcttctttcaattgatgcagcgcggcgatggcctcattttttggtgttgcttcatctggaaaatgaatgtaaaaaatatcgatataagttgtttgtagtctttggagagcttcttctacagattttcgcagaaattctggtgagttgttgaattgataattattctctggatcatgtgcggcttttgtcgcaataataatgcgtgagcggtcaaattctggctcctgtaagacttcaccgatcaactcttctgaacgaccgtagccataggcaaaagccgtatctaagacagtaatcccattattgatcgctgtacggagtacgtcttttccagtttcgtcgtttaagtttggatgaatattgtgtccgccgacagcatttgttcctaaacctaaatcacttgcgtaaacacgtgattttccaattcgtacatctgacatatcgcattcgctccttttacttaccactggagaattccaacggcttttctttttcaagtttaagggaaagtctcaaaaaaagcgactaatctattttatctcctgccaagctggaaagcagtgtgcatttttctgtttaataactatcatgggaaaagcggcaacttcttttttatcaccggaaatcacttgactttcaagtctttttttagtagcttaagaagagataaaaacatcaatgaaacatctaagaaggaaccagtaaattacgaaaaaacgtacagaaaaaattgccttggctgaaagcaatttcgtgaaaagtaattgaaagacagtctggagatgagcgcgtgcaaagccgctccgttacgcaagcgttaattgctagagaaaaagagtgaagctctttttaaaaataggtggtaccgcgatattttcgcccttgttcattcgagcaagggtttttttgtcagttgtcagttccgcttttcgcagtgtaaaagatcgatacatgttcactattttaaaatggaatgattgatcgtgttgtttagcggaatgatatgcgtacgaagataggttcattttttcgctttttggaaaaatgatttccacgatgttgagctagctgccgatcatatgcttaatatcaaatggagaataatttgtagaacagtcttattaactaattaaatacattaatatgaaaaaggatttcagttcctcttttctcagtaattatagttagagaagagagtaatgatttaacaaaaaataggctggagaagtttagaggaatgtcatacggcttgaaaatcgaacttatttttctggtaagaaaaataaatacattaatatgaaaaaggatttcagttcctcttttcccagtaattatagttaggaaagagaataaagatttaacaaagaataagttggagaagtttagaggaatgccatacggcttgaaaatcgaacttatttttctggtaagaaaaataaatacattaatatgaaaaaggagatataccatgagttatcaacgaccaaaaggaaccaatgatattttaccgggagaaagtgaaaaatggcaatttgtcgaagaaacagctcggttagtatttaatgattaccaatatcaagaaattcggacacccatttttgaacattacgaagtgatttcgcgcagtgtcggtgatacgaccgatatcgtttctaaggaaatgtatgatttccatgataaaggagatcgtcatgtgacccttcgcccagaaggaacggcaccgatcgtgcgtgcatatgtcgaaaataaattgtatggaccagaattcaagaagccttacaaggtttattacactggaccgatgttccgttacgaacgtccgcaaaaaggtcgtttacgccaattccatcagatcggcgtagaggcctttggcagtgaaaacccaagcttggatgtcgaagttatggcgatggcgatggatttcttcaaacaattaggaatcaatcaattacgtcttgtgatcaatacgctgggggataaggaaacacggacaaattatcgtcaagctctgatcacctatcttgaagcgcatgaagaagagctgagcgaagattcacgtcgacgtttgcatgagaatccactgcgtgtgttggatagtaaggatcgcaaggatcagccaatcgtggccgatgcaccaagtattttggattatttgagtgattacgcgaaggaatacttcgaaggggttacgaaaaccttggagtacctaaatatttcctacgaaatcgatcaccgaatggttcgaggattggattattacaaccatacaatctttgaaatcatgtgcgatgctcctggaatgggtgcacaaacaactatatgcggtggtggacgttacgatggtttggtagaagagttgggcggaccggagacacctggaatcggatttgcgatgggaattgaacgaattctattaacgctggaacaagaagacgtgatgattccaagcgcagcaagtctggatgcgtatgttgttggtcttggtgaagcaacaaatatggaaagcttaaaagttgttcaagcgattcgcggttttggtttttctgctgatcgtgacttcatgggacgtaaagcgaaagctcaattcaaaacggcagataaggaaggggcaaagcttgtcctaactttaggtgaagatgagttgtccaatggtgtaatcaacgtgaaggactcagcgacacgggaagaaaaggcgtttcctttaacggatatctatgaagattttgcggcgatctatgatgaaatgactatgccgaaacttgattaatcgaaataaatcttacctaataagaaagattacttaaataaatggaggaatgaaaaaatggctagacgtacagtctattgtggacgagtgtccgaggagtatatggatcaaaaagtaacattaaaaggatgggtacaaaaacgtcgtgatttaggcggtttgatttttattgatctgcgtgaccgtgaaggtattgtgcaggtggtcttcaacccagaagaatcgaaatccgcttgggaaattgcggatcaatgccgtagtgaatatgtagttgaaatcactggtacagtcattcgtcgggatgctggtgcggtgaacaaaaaaatggcaaccggtgattttgaagttaaaggtgaagaaattgtcatcctaaatagtgccaaaacaccaccattttcaattgaagatgaacaaaatatcagtgatgaagtgcgtttgaaatatcgttatatggatttacgtcgtccgaagatgacacaaaacttgatgatgcgccatcgtttgacgcaatcagttcgtcgtttcttggatgataatgacttcttagatattgaaacgccatacttggctaaatctacgccagaaggtgctcgtgactacttggttccttcacgtgttcatccggggcatttttatgcattgccgcaatcaccgcaaattttgaagcaattattgatgactgctggctttgatcgctattatcaaatcgtgcgttgtttccgtgatgaagatttacgcggggatcgtcagccagaatttacccagatcgatattgaaacaagctttttatcagcagaagaaatccaagattatactgaagcgatgatcgcacaagtcatgaaagatgtacgtggtgttgaagtgacgttgccattcccacgaatcacttgggatgaggcgatggaacgctatggttctgataaaccagacactcgttttgatatggaattgatcgatgtgacagatatcgcttctgccacagattttaaagtcttccgtatggcttcagataacggcggtgtcgtaaaggccttaaatgcgaaaggcgcagcggataaatactctcgtaaagaattggatcgcttaggtcaattcgttggtcaatttggcgctaaaggcttggcttggattaaggttgatgagaacggcgaattaactggtcctattgcgaaattcatgggcggtgtcagtgatgaattgaagaaagcaacgaatgccgaagcaggagatatcttaatgtttgcggcagatcaattcttaacagccgtgacagcattaggcgcggttcgttcgaaagttgggaaagaattaggtctgattgatgaagaccgtttcgattatctatgggtagtggattggccgcaatttgaatttgaccaagaattaggtcgctacgtttctgctcaccatccattcacgatgccgatggaaaaagatatcgaaaacttgaaggagcatccagagaaggtttatgcgcaagcctatgatatcgtcttgaacggctatgaattaggcggcggctcactccgtattaatacccgtgaactgcaagagcaagtctttgaaacattaggcttcactcgtgaaagtgccaatgaacaattcggtttcttattagaagcgttggattatggcttccctccaattggtgggatcgcacttggcttggatcgtttcgcgatgctgttagcaaatgaagacaacattcgtgaagtcattgcctttcctaagaatgggaaagcagcagaaccaatgactgatgcaccaagcacagtgtcaccattacagctttacgaattgagtatcgatgtcacgaaaatcgaagagtaaagtagcaggcattaatttgctgtttttctaaagtttttacatgaactctaagaatatactaagagaagcgcctacctccatggtaggtgctttctttttttcatgaaaatacgtataatgtgagtgaaattttgaaatgaggcggacaggacatgatgaaaaagaagatagaggagtggccccatcacgattatgccacccgattatctgtcgcagttgtttatgcatttttagcggcgattgccgtaaactttttttaccagccaggacatatctattccagcggagccaccggctttgcacaaattttaacaacgttatcagatcgggttgtcggttttaccgtacctgtatcgatcaccttatttttgatcaatgtgcccttatttttcttggcatggttcaagattggtcataagtttacgatttttaccttcattactgtttttttaacatcgttcttcattcacattattccccagacaacattgacgaaggacccaattatctgtgcgatttttggcggagcaatcatgggtgttgggatcggatttgctttgaagaatggtctatcttctggcggcttagacattttgagtatcgtgattcgtaagcgaacagggtcttcggttggatcaatctccatcattttcaatgtgatgatcatgctgatggcggggattctattcagctggcaatacatgttttattctgctttagctatttttatgagtggtaagttgaccgatgcgctctatacgaagcagcggaagatgcaggtgatgatcgttaccaaatgtccagaacgtgtgattaattcaatccaggatcatatgcgacgtggaataactatcattaatgaagctgaaggtgcgtataagcatgataagcaaaccgttctgtttactgtagttacccgctttgagttgccattactagaatcaatcatgcgggaaaatgatcccgatgcgttcgttagtatttcggaaaacgtacggattatggggcgcttttacgaagaatcaatggattaaagattaagtgtcgctttttgacaaatatgactgatagaataattatgaacatctaaggtagaagaaaactctattttagatgttttttagaaaaaggattcttttaatgagagctagttgtcagttctatttttaatggctacgtatatgaaaatattccaactaaataaaaggaattaagccattctgatcgaattattttaataaaaaaacttaaatatttaggaaatactttttttatggagaaattgttgcagtttacgaaaaatatccgtatagttaatttgatattctatagtaaagttggaaagtaaacttatgggaaaaagattaaagcatagtcgctatattactgggtttgacggaattcgctcgttagcggtaatcggcgtaattttatatcatttattgcctacgcaaatgcggggtggatacttaggggttcctgttttttttgtggtctcaggttatttgatcacggatttgctactgcaggaatggaagcaaactggtcgtatcgagatcaagcaattttattatcggcgtatgaagcgtctatacccggcgctagtcacgatgcttgtgggtgcttcagcgtacataacgttatttcaacggaatcttttgaataacttgcggggcaatgtcatcagcagcttgttctacgtgaacaactggtggcagatcaatcatggaatgtcttattttgatcgattttctggtgaatcgccctttacgcatatttggtcgttggcagtggaaacgcagaattatattttttggcccatcatctttgttttattgatgaagctggtgaaaaacaagggaaaagttttccttgggattgtcgcggccgctttggtctccgcgattttaatggctgtgctgtatgtgccgggacaagatcctacacgggtttattatggaacggacacgcgcttgttttctatcttgctaggaggtgcgttggcttttatttggccaagcacacgcttgaagccgcagattccgtcacaggctaagcgaatacttaatggaattgggttaggctcgttattgtttcttgttctggcattcctatttatgcgggatgatttatcctttatctattatggcggtatgtttttagtcagtttagtgagcgtcatattagttgctatcactgcccatccaggtgctagctggaaccgttggttaacgaatccggtctttgattggattggcaaacggagctatgggatctatttatatcaatatccagtaatgattttctatgaagcaaaggttaatgtagcgaatcatacctttcttcatacgattatggaagtcattctaattctttttgttactgaactttcttatcgatatatcgaaaatccgctgcgccggttcaattaccgtaagacgtttgcctcactaaaacaatctttttgggcaccaatcaaaagtcgcaggaaaatcggatttatcttttctagcttaatcactgtaatcgcggtagtaggtgtgattatcgcgccaaccaataaagttgatgccaatcaacaagcgttacaaaagcaaatcgaacaaaataagcaggcttccaagaaaacagacggggagacggccgcaaacgattctaatggagcagcagaatctacagatagttctgaagcaccaaccagtttagctgataaatatagtctaagtaatcgtgagataacgaaggcaaaaaatctgaaagtgacggcttttggggattctgttttattagcaggctccaaaggactgacagagatatttcctaaaatggttgttgatggcgaagtcggacggcaattgaaggatagtccgccactgttgaaagccttgaaagataagggcgagctaaatgatacgattctcttgagtttaggaacaaatggtcctttcaatctcgatgactttgctcaaatcatgaatgttctaggggacaagcatcaagtctttatcatcaatactcatgtgccgacgcgtcgttggcagaatgatgtgaatgcaaatctagaggccgctgccaaggattataagaatgttcacttgattgactggtataatttcagtaaggatcatcaagattggttctatgatgaccaggtccatccgaatgatgttggatcgatccattactgccaattgatcgccaaggaaatactaaaaggcgaataaactgaaaaagacaaaaaaacgttttgtgagtcactcacaaaacgttttttgcttgatgctctcgcaagtacttttctttttgcctgcggggtaattttttaaaagctgattccgctttagtggcctcgctgcgggtttcaaagcgctcggcgtgaatcattttgactggtcggcgactctgagggtgggtatattttgcaccagtgcctgtattatgctccaataggcgtcgggataggtctgtcgtatagccgccgtaaaagctttggtcattgcaaagtaaaacataaaagaattgatcagttgccataaagcatctcctgtaagtcggcagagtagctgcccgtttggtcataggtatataatggtggaagaaaacgcagaccttcgtttttgccgtctttgattccttcgattagtagaatattggcttctttttctggttttgggtaaacgaattggattcgcttcggcgcgatccggtgtgcacgaagacagtccatgatttctaaaaaacgatccggtcgatgtaccattgcgaaacggccattcatttttagtaatttcgcagtgacactgacgacatcctctaaagtcgcgtgaatctcatgacgagcaatcgctaaatgcgggttaggatttttttgacttgttggcaattccttgaaatagggcggattgcagacgactaaatcagcagaatcggctttaaaaacgtcaaatgtcttttttaagtccagctcgtgcatcgtcatttggttttccagctgatttaaaagaatactgcgtttgcccatgtcagcaagacgaggttgaagctcgatctggtcaatcagggcagtggtttttcgacttaaaaaaagtccaatcgcgccatttcctgcacaaagatcaatgatttttccgcgttttggcacacgagcaaagttcgctaatagaacggcatcaatggaaaatgagaaaacctccgagctttggatgatttggatatcttcagcataaagctggtcgattcgttcgccatttcttaacaatttcatttgcccccttaaaaaaatcataccgttgtattatactacgtttagttagttaactgaaaggaagaaatcatgttttttaaatttattcgcgtcattgcccgaacgatcttggcggtcgtcaatggcaatgctcactaccaaaatcaagacaaattaccagagggaaactatattcttgtggcgcctcaccgaacttggtgggaccctgtctatatggctctgggcgcatcgcctaaacagtttagttttctggcaaaggccgagctgttcaagaatccgattttgcgattcattctggtgcatttaaatgccttccctgttgatcgcgacaaaccaggaccaagtgtggtgaagcgaccagtcaaaatgctgaaggactcggataagagcttgatcatgtttccaagtggaacccgtcattcttctgagttgaaaggcggaatggcgttaatttctcgtttatcgaaaaagccgatcgtcccttctgtttatcagggacctacaaagttctctcaactgtttaaacggacccccgtcattattcgttttggtgatccgattgatctttctgacatcaagaaaatggataaagctggattggccgaggttgaacgtcgtgttcaaggagcgtttgaccagctagatcgggagattgatccgaatttcaaatatgttgccaaagaaaaaaacgccgagtagttacagattatcgacaaagtaaggttccaagctcaattttcgagcttgggatctttttttggtttgatttcaaattttgaaaaaaacgcatggatctttctttatcttataaaagttgagaaataaaccgttcctgtagcaacatccacttgctttgcggaaaaaaatggcgaatcatgttatacttttgggaaggacttaattaggaaaagggtggatcaatgaaagttttgcatactgcggactggcatatggggaaaaagctgcacggctatgacttgttgccagatcaagcatatattcttgatcaaatactaaaaatcgcaaaagaagagatcgtagaggccatcgtaatcgcgggggatttatatgatcgttctgttccttctgaggcgagtgttcggttattaaatcaaacaatcgctgattggaatttaacgcagcagttcccattactggcgatttcgggcaatcatgatagtgcgactcgcttagcaacagggacaccatggttcaatcaagcacagtttcatttgcatactcgcttaaaagaagcttttacgccggtggaaatgggaaatagccaattttatctattgccttattttgaaccggtggatgcgcgtatctactttgaagattcagagcttcgtacgattcaacaggcaatgccgaaagtaatcgaaaaaatacaggaaagctttgatccggataaaaaacacattttagtcagtcatttttttgttgccggcagcagcaaaacggactctgaaacgaagatcgaagttggcggacttgatgggatcaatgggaagttactcgaatgctttgattacgtcgcgttgggccatctccatgggaaggacgcgctaaaaatggcgaatgctcgctacagcggctcgcctttgaaatactcattgtcggaaaaggatcaaacaaaaggtgtttggatcgttgatacagatactatggacttttccttccggacattgacaccgcttcatgaaatccaagagctgcaggctagttttgctgaattattagacccagctttttacaccacgattaatcgggaggactatttgtcgattctattagaggatcgagcggtgattcccaatttaatgaaccaactgcgccaggtctatcctcggatcattcaggtagaacgtgcgaatggctttgagacagctgttgagaagcgtctgaaaaaggaaaatattaaagagaaatctccagttaatctaacaaaggatttctttacagaggtttcccagaatgaactgacagctaaacagaaaaaatggatcgaggaaggcttacacacgatcctgaaaaaaggaggcgaggagtaatgcttccaaagaaaatcattatggaaaactttggtccgtttgttcacgaagaagtcgattttgacgaactgacagaggcgccattatttttgatcagcgggaaaaccggtgctggtaagaccacaatttttgacgcgatcacctttgctttatatggcgatgcatctggcggtgttcgttcatcaaacgagattcgatcctcctttgctgagccaactgaagaaactcgggtgcagttcattttcgagcaccaaggaagaaagtattctattgaacgttggccgaagcagaccttagccaagaaaaacggcaaaggcgagacgaccaaaaatcaaaaggttcaattgagcatttttaatgataagggtcaagaggctgaggcctataccaaggtggatgcagtgaacgaggtcatctatcagattttaaatctgcaaaaggatcaatttcgccaaatcgtgatgctgccccagggagagtttcgaacgttcctcaatgcgaatagtactgagaaggaaaccgtcctgcggagtttgttcggcactagtttctatcgccaattcacagaaaatttgaagcttcaaaagtgtgagctagagaaatcagtcagtgaaatgactactcgtattgatcaattatttcaacaagtcgttgctgaaaaaggtgtaacttatggggagtcgctaaatcttgctcgtgagtatttactattggaagaacaagagcttttgaaaagtcagacggagttagcggaaaaacaggctaaacaaaaggcccttcaacagcagcttcaaagagcacaggagctgtctgaaagcttcaagcaggagcagcaaactcgtcgcgagcttctaaaaatcgaagagcagctgccagagcaggaagaaaagaaacagcaattggtgcgggggagagaacttgagaaaattcgtccaacctatgatcgcatccaagagttggtaaagcagcagattcagcagaccgatgaagtaactgagaatcagcaacgtgcagctgagctagagcagcaatatagtgagtgccaaaaacaaacgactgattttgagcagcaaagtgccgagtggcaaaccaaagagcagcagctgcaaagcttgaacgctttattgcctttggtcaagcaaaaagagcagctgatgaaacaaaaaacggaactgacagataaacaggcgaaacagcaggagcacttaacagaaattattcaacaaataaaggttcacgaagaaaaaatcaaactgctggagaccaaacaaaatacggaaaaaatgtggcaggatcgtcgttatgaggagctacagtttcaacagacggtgactcacttgcagcaatcagccaaagatattttcgatcaacaggaggaagaagaggaccagcagatcaagctggctcaattggttgaaaaagccagtcgtacaagcaatcaattaacaagtgaagtggcagattataagaagttgaaaagtcagtgggcttctgcggaaattgcccgattaagtatggatttgcttccgggagaaccttgtcctgtttgcggttcaaaggagcatccgaatccagcccagcacgctgagttgaccactgataatttgggacaattacaggtggcgctagaaactcaggaaacgcgaattaagcagttagagttgattcgggaacaggcagaggctcagtatgaggttggaataaaaacctttgatcaattacaggaggatcggtcggcggcgcaaaaggcgcaagaagagcaaatcaatactcttcaggccacttttgccgattattaccagctggaagttgaagccgatttatcggagcttgtgatatttcttagggagcgtcaaaaagaaacggatgaacgtttagctgagattaacgaatcgaaacaaaccttgcttgacctgaaggcagagattgataataatcaagctaaaaaacttgagagcgagactagcttaaatgttgtgaaaggtgaactgcaaaccttagagggcagattgtccagtattgaggagcaaaccaaagagtggcagttgccgactttggaggcacatatcgttgaactgcagggcaagatagacgagtatcacactcacctgcaggcacaccaagccttagtgaaggaacttgagcagcagcatatccgtctgcaggaaaatcataagctattagctaagcaacagcaagagacgggggagaacctagaaaaatttcaaacgtcactgcaacagcaattggtagatgcaaatttagctattgaacagttagcatcagcgcccattgatcttttaagtttagaacaagagattacagatttcgatcaacagctcttactgctaaaagatcgccaatcacggttggcagaagtaatcaaggatcaagagaaaccagagctggatgagctgcaaaccttagtgacaagctgtgaagcagaagtcactcaattccaacagcagcattatgccaaagaaagtcagctacagcaacaacgcacgttgattgaaactattgaagatctacaggcgcaaagcaaggagcaattggacgaattaagccaaatgatgcagctttatcaaacgatgaacggagataatccgcaaaaaatcagcttagagcggtatgtcctgcaatggtatttggccgaggttctgcaatgtgccaatcagcagctgaatcagctaaccaaggggcgctatcgttttgagttgaagcaggaaaccggtcgatcgaaaggaaatactgggcttgagatcaatgtttatgatgacaatgccggcgcaacgcgtagctctcataccttatctggcggcgaaagctttatcgcagcgttatccttggctttgggacttgcggaagtgatccagagtcaggctggcggcgttgcgattgaagccttgttcattgatgaaggctttggatcattggatgaagaagcgttggagatggctatggaagccttggaaagcattgaaaatgcgggacggatgatcggcattatcagtcacgtacgagaattgaaagaacgtatcccacaacaaattattgtggaaactagcggaacgggacgcagcagtattcgttaccagctagaaggatggagtgaaacgtaaatgagatggagtattccagaaaaagtgatcgaacgcggcagaacgtatttaaaagaggggcgggtcttatccgttgaggcagatccggctcgtcgtgtttggcatggtgaagtattaggcagtgaactttatctggttgatttagatggcagtggaaaagaaaatgatatttgtgcctgcccgtattgggaagagcatggttattgcaaacatacagtagcggttgaattatatttacgggaaaaaggtctttcgcgggtaatcaagccagagactgtcttgccgaaaaaaatggagagcagtatttcttttgctgatttgttaaatcaaggcttttcaagattggaaaaggaagcagagcccttgcagtccttatttgttgaatttgtggtggaggccgttccaacgaatccttatcacccagaattggatgttttggcggtgtcgctgcgtatcggcagtcatttgaacaaacgcagctatatcgtgaagaacttatatgactttttacacgcatatcagaccgattcagcctataccgtaaacaaacaatataaattccagatcgaggcgggtgcctttgatccaaaatgtcgagatttgattgaagatttagtgggagtcagtgaaacatatcaattattagggaaagctggtctacaggtcaaaggtaaactagacaagcgttatcttttattgccggttcatcggattcaagaactattggaagcgatggaaaagactggaaatttaagtattaaactaggtgaaaaaacctattctgaagtgcatgagggacaagagctaccactttcattcactttggaaaaacgtggagaaaatgattttggtctaaccatcgaggatggcttcaccaattattatagtaattatttcttaggcttcgttgaaaattcctattatttgatgactcatgagcagcaggaaacctacattacgctgaagcagctgatgaagcggctgaaagaaccggttattgcatatgagcaacgacaactttcgcaattattcacagacgtttttccatatttacggaaaattggtcgagtaattgttaccgatgatgtggcagagatcatgaaggaggaaccgttgcgtgcggtcgtcatctttcgaaaaatcaaaggaatgataaaggcggaagctgagtttcattatggcaacgcttatttctctaccaatgaggcgcatcagcccaagctgcctaataatgtcgagattttaagagatcgtaaaaaggaaaaacaaatcctggatctctttactacgtaccggtatcaaaaaatcgatacgggctttgaaaagaaattaccgattaaagacaatctttattacttctttaaagtcgaagtggaagagtttagacgatatgctgaagtgcgtatgggcaagaagctgcgtcagctcttcttagacggtgaagaattccaaccaacaatcgaggtggatcaggaaggatcatggctcgatatcaagtttgatgtgacgggaatcaatgataatgaaattgaccaggtcttgaacagtttgctgcggaaggatcgcttttacacattggataatggcgaggtgctctcctttgattcagaggccttccagcaaaccagtgaaatgatcggtcagctgcgggaaagaattagcgcgaacgatggattgatccgcttgccgaagagccaagggattatgctagaacagcggttgaaggataatccgcaggcacagttcagcgaaagatttactgcgatggtgcaggatttgactcatccagaggattatcaagtggctttgccagagaatcttaatgccacattgcggccttatcaagagtcaggttttcgctggttgaaaatgctgagcgattatggctttggcggaattttagctgatgaaatgggtcttgggaaaacgattcaggtaatcactttcttattggcggaaaaagcacagcaaccaatcaaagtggtaattgtcacgccagcgagtctggtctataactggcaggcggaaatcaagaagtttgcgccaagtttaagttcatcagttatttcaggcaatcgtagcgaacgggagcagttgcttgaagaggctgaagagattgttattacgtcttatgcaagtctgcgtcaggatattgatctccatgaaaagatgggttatcaatacatgattcttgatgaagcccagatggtgaaaaacgcctcgacgaaaacttccagcgctttgcgaaacttatcgattccacatcgcttcgcgttgagtggtacgccaatcgagaacaatctggaagagctgtggtcattattccaaacgatcatgccaggattcttcccaccgatcggacgtttccgtcaaatggctgttccagaaattgctaagatgattcaaccgtttgttctgagacgcgataaagataccgtcttgcaggaattgcctgagcggatcgaatcaaatgtcttgagcagtttgacggaagagcagaagacggtctatcttgcttatttaaaacgaatgaagcaagaggtcgaccaaatggattcagcgacattccgaaaacagcgtgtaagtatcttagctggtttaactcgcttgcgtcagatctgtgatgatcctcgtttgtttatggaagggtacgaaggtggttctggcaaacttgatcaagtcaaggatctgattcaagtggcgaaagaaaatggtcgacgagtcttattgttctcacaatttactagtatgctttcaatcattgaagaggagttcgcggaagaaggaattactagcttctacttgcgaggcagcactaaagtttctgatcgcctaaaaatggtggatgccttcaatgcaggagaaaaagatgtctttttgatttcgctaaaagctggaggaaccggtctgaacctgactggggcggatacagttattctctacgatctatggtggaatccggcagtcgaagagcaggcggcaggacgtgctcaccggattggccagaagaaggtcgtcgaggtatggcgcatgatcgctgaaggaacgatcgaggaacgaatgaatcagctgcagcaagaaaaacgcgagctgttccagaaagtcatccaaggcaacgaagaacaaaccaataaacttacagaagaggatattcgcatgattttaagtttaggcgaatagaaatagaaaaagaaaagtatgccacgttcagtgcggcatacttttttggttcgtcagaagagatttcaaatcctcaaagtttttgatttctttttcaaaaatagcgctttgaccttctggtattttacgattttggtgattgaaccaccaaacggaccagccagcggccttagcgccaatgacatcattttcaaagctatcaccaatatataaaagtgattcaggtgccaatttcaatcgtgtttccatcaaagaaaaaatttttggttctggtttttgaataccaaccgcatctgaaataatcattttttcaggcgcgatccaacgagctaattgcaacgcgctaattttctctttctgtcgcaataccggtccatttgtgatcagacctaaaggaacatcctgttgattcaagaaggttaatgaatcactgatttcagaaggtaatgtgattgtttttaatgcgtgatcgtaggccgcttggaatgtctccaattcagatttacttggaacaaaatcaaaatcagctagtgccagacgaattcgctcataacgcatttttgctaaagaccattctcctgtgatcgacttcatatagtggaggtcactataatagcggaaacgaataaacaaagcgttcatcttactttctggaaaagtcggaaacaaatcgttgatagcagaagcaaaaggggcttgttgtttgtataaggtatcatctaaatcaaatactattccttgaatcatttactcactcctaaggtttcaataaacttattatagcaaaaaaataattattttatttggactgagcaaaaaagtggcgcaaaaatataattcttgttatgttattcgagtagcaaagtaatgaaaaaaacatgaaccggaatcaatcaaaaatattcttcgggaaaaaaataatgattgagaagagaaagaatagctggaatttaagatctaccaatttttggaaactctataaaatttttgattttttttgaatatttgaaagctgtatctatttttaacgagtaatcctgatggaaaatttaatacagataactgtctcagagattaaaataaaataactataaaataataagcaacatctatgaatgtattttccattttaaaatcattctaataaagccttgatatacaaaagatttatgaatataaatatatttttttattgaattggttatcaaaattaaaaagataaaaaaattcatttttttaatttgatataataattttgcataaactgtattagtaataatacagtttttttagctgttatagaacggggtcaaatgagagcggcgccactaatttctcatcttgacaaattaaaactgtcgtgacagttgttatagtcgagaattaaattaaataacgttaatatttgtaaaaaaaaagacacccaactcttttttttgttaccttttttctgtataatagaaacagatagtaggaaaccactactacctgttacaaaaattgagagtcaagaaaaggagtgatatgcatgttaacactatatacttcccctagttgtacatcatgtcggaaagcacgtgcttggctacaggaacatgagattccttatgttgaacgaaatatcttttctgagccattgaacattgatgagttgaaggctattttacaaatgactgaggatggaacggaagaaatcatttcgacccgttcgaaagttttccaaaagttgaacatggatttagatgaattgtccctaaaagaattattggatttagttaaagaaaatcctggattattacgtcgtccgattatgattgacgagaagcgtttacaagttggttttaacgaagatgaaattcgtcgtttcttgcctcgtgatgttcgccaatatgaattacgtcaagcccaattgatggctggattatagaatagataccccgcaaaaagtggggtattttttttgtgtatttatctatctaacgcgtaacgattaatttgctctcctttttttagcttgtaagtttcactacagactaatgcgatcttgaaatcttatgatctcattgtttataggattttaataaaattcgacggctttctttacttttaagcggaatcagttacaatgaacatataatctatctttaaagtgaggtgtgccaagatggagatggaacacatcaatgaaaatacgatccgagtcattattgaaaatgaggatttagccgaacgtggaattacttttctcgatttattaggaaatcatcgggaaatcgaatctttcttctatagtattttagaggaagtcgatattgaggatgagttcaaaagtagtgaggcggttactttccaagtccttccgaaaaatgacggattggaactatttattagtaaaaacctgacgccagaagacatcaacaaaatgaacaattcaacagagttcgaagcaagcgattttgatcaattgattcgtcaacaaattttagcgaactctgaaagtcttgaagaagacgaaaaaaccagccgcttacgggtttttcaattgaatagttttgaggatatgattgaattagcaagctatcactttttagatgaagcctggtgtgatttatatctactgaatgagaagtattatttgcagatttattttgaccctgagatttttggtgaattcggtttatcagatgttattgctgaagtcttagaatacgctcaaaattcctctgtttcaacagaaatgttggaagaatacggaaaacttttgatgcagcgtgatgcgatcgagattactcgtgctcattttaattaaaggctcttcgtcaaatcgtgttggtgaagacaaatttgaataaaacttagtccgatatgcggcgcgttctgtgcgccgcatatttttttagttttcaaagatcagaccttgttgtaaatagatccgtgcccgaaagttataaaagttgcgataaccaaacgcaattcgtttaatcagcttgatcttgttattcagcccctccgtgacaccgtttgagtgggacactttaaaggcatttgaaatgcccgattggtagcgatggaagatcgtgaatttctttttaaacgactgaggtaacgtagatgaaattgttttaagggtttcttgaaagccttccgtatctcgtttaacgaaataatagcgtaataattgacaaaaatgatacgctgttcgcaattcttcgttgtagcttaacagttcatcgacgatttctgtttgactaattggtcgtttaaacagtcgatgataatgccgtttgagtggctccaatgtcgtggaatctttgagtaagagtttccaatatcgcttgagccgacggtacttcttctgattttcagagtgtgaggttcgaaaacgattcatgatctggacacgtaattgattgaaactgcgattgatgtgttggacaatatgaaagcggtcagttacgatctccgcatttggaaagaccgttttaagcaactgacaatagctggcattcatgtccatcactaggtacttgacctttaaacgggcctttctaggaaagcgcaggaagtattgagttagtttgtaaagtctgcgatcttcaaggatcgtaaatagctgattggttgtcccatcaacacaaataaaactcatggaaccagaaacagacttcattgatttgaactcatccatacacaacaccgtcggaaggaagttcatacgtggctggtaatgcttcgttgcttcacgcaagatccgtgtcaccgtcccatccgagacgaagtacttcttagcgattagtttacgtgattgattttcgtacagttccatgagaatcgcctgcttcagttcctttgttagttgatgatgttcatcaactaagtccgttttcgcagaaaaggtccgtccacaatcatggcagagaaaacgggtacgttttaattctaaaatagttaacttttctttgactttcaacatctgagtgcgtgtcgtataggaaccgttgcggataatacgaaccgatcgacagtgttcacaacaggaaggagagtcatccaattttcctttaataaactgcgcttgaacgcctttatattctttttcaatcagccattcttcatcaaaaaataaatgtttatctgttaatccgagtaattttctagtatgattatccattgagagactcctttggtagggtgacgttttggtcgactaaattttaccaaaagtgagtctctttttgagttgaaacgaagaaaaaagtgttagtagaaaatcgccttcgattttccaccaacacaaaatattatagaacctaattaaatagttcaagtaccactgttcattcgaatggtggtattttttttagcttgctgaaatttgaaaatctttctgtttctaattgcgtatctttttttgaggtgagaagaatgttgtttgcttacactaaggaaaaagaaatgatcagtgcagttgaaagcgataatcaacagcagtttttttgtccagactgcggtgaggaattaattcgtaaagcaggaaaaatcaagattcctcactttgcacatagtcagaatacagaatgctatgggttaagtgaaggggaaacaccggagcatctgcgattgaagcagctattttatacatgggggaatcgtttcgaagaagcctggcaaatggagcaaccattacctgatttaccgcaacgtcccgatttattacatgagcacttagcagtagaaatccagtgttcctcattgaaaagtgttcgcttgcaagaacggattgatggctatgctcaaaaaagctaccgagactggtggctgcttggcaaaccgctatggcccaaagaaaaattcacacatctgcaaaaacagttttgttcctttgacaaagacaaaggactgcatttatggctgattgaggagcaggggattcgattgctttaccacattcatgagattgacggcttcgtgtattgtgaagagcattggcctgctaattcaaaacccttaaaagaaatttttcattcatcggtcaacaaacgaccaccgcagcttgttcctactatagaaagtgtgaatgaacagaaaaaaatattgagcctgaaattggttcaaagcaacccgcgaattcgaggcctacaacatttttttatcaggaacggagacatcttttgtatttgccagaatggctatattttcctagtcgctatttctttttttatcaagaggatcttctagtatttcgctatttattccaaaaagaagcgaaaaatgcttctttgatttttgagaaatttttggattatcgtcaggaaaatcataaagactgggcattttatcgaattgatcagcgggagatattagaacgactctatcttgaggcgatcttttgtcaaagaaaggctaaagtttcaccagtctaactacttttaaaaattacttttttctaaattgtggtactattgatgatgataaatagttattctatcacttttctaagtgaaaaagtatcttaaccagttaggagtgtttttatgagtgaagcaaaacaattgcccaaacgccaagaagttcctattgagctgacttgggacttaacgaaaatttttgcagatgatgctgcttttgaggagaaattccaagccttatcagaggagctatccgaagttgataagattaagggaactttggctcaaggtgcaacggaatttttaacagcgattgaatatgttttagatatttatcgcaaggcggaggtcatttatgtatatgcacatctaaaaaatgatgaagatactgcaaatacaacaaatcaagcattatatgcacgggcttctagcttaattgcacaggttagtgaagcagtcagctggtttgagccagaaatgctggagctatcagaccaagaaatttgggccttttttgagaaggaatccaaattagagctgtatcgccattttgttgagcagatcatttctgagagggcacacattttaccagctgaacaagaggcgctgttagctggtgctagtgagatttttggtagttctgcggatacattttctgttatgaacaatgcggatctgaaattcccagttgtgaaaaatgacgagggtgaagatgttcaattaacacatggggtttatggtcaattattagaaagtacgaaccgaaatgttcgtgaacaagcatttaaatccttatattctgtttatcatcaatttcgtaacacctttgcttcaaccttgagcacacatgtcaaagggcataactacaaggctaaggtccgtggatacggctctgctcgtgaagcggcgttaagtggaaatcatattccagaagatgtatatgaaacattgactttggtggttaatcagtatttgccgctattgcatcgatatgttgaattacggaaagagctactaggattagatgagctgcatatgtatgatttatatacaccgcttttagcagaagcgccagtcaagtttagttacgaagaagcacaggctaaggcacttgaagccttaaagccattaggtgaagaatatctagaagttgtgaagaaggcttttgctgagcgctggatcgatgtggttgaaaatcaaggtaaacgcagtggtgcgtattcttctggtgcttatgatacgcaaccgtatattcttttgaactggcatgatcggctagatgagctttatacattagttcatgagatggggcacagtgtccatagttatttcacccgtcatacgcagccttatgtttacggcgattactcgatctttttagcagagattgcttcaacaaccaacgaaaatcttttaactagttatctattagaaacagaaaaggatccaaaaattcgtgcctatatcattaaccattatttagatggatttaagggaaccattttccgtcaaacacaatttgcggagtttgaacactttattcatactgaagatgcggctggccatccattgaccagcgaacatctaagcaaattctatggtgaattgaatatgaaatactatggaccaatcgttgttaacgacgaagaaatcaaggatgaatggtcaagaatcccgcatttctactataattattatgtctatcagtatgcgactggcttctcggcagcgagtgctttagcaaaacgtattgttgaggctgaaccagacgcgttagagaaatatttgacctacttaaaatcgggtagtagtgattatccgatcgaggtgatgaaaaaagccggtgttgatatgacccagccaacctatatcgaagacgcgatggaaatctttgctcaaaggttggatgagttggaagagcttgttgaagtgttgaaaaattaattaatgatgaagcaggagtggaatgaagctcctgcttttttgacgttttatttgaagccgagagttacatagcaagatagccgacttaagagactcgctagttatgaaggaaattttgaacgattgctgcttttggttcattgttatccgaaaatatatttatttttattaaagattgctattctataacttttttataaacactaaataatagaaaattaggcttgaaaaaaagtgaataggacaaggtttcgtaattgaattcttaataaatagaccgttatattcaaatatttgaaagaaattatacaaatggaatttctcttttgataattattatgcgagaattagcataagtagagggggtggagttctaatgagtaaaccgaataaaagggacaagattgatctgcttttaaagttatcaattgcggtcatgtttatagttggttttctaatttttatgtatcccttcgtcgttgattcgatcaataattatgtggaccaacaacggcttgaagaagttcaggataaaatggaggcacgttcggaggctgaaaagaaaaaacggctgacgaagcttgaaaaagaaaataaaaaattaaagacgatcattccaggagcaggaagttttgaggatccttttgaatcttccttagaaggaaccaagagtccgaaaaaggaatattacgaagaacatatgattggtgcagtgtacattcccaaaataaatgtgagtctgccagtttatgatgaaacgaatgattttttgctagataagggagcgacggttctgcaaggaacctcctttccagttggaggaaagggtacgcattcggtaatcacagggcatactggtttgcctgaaaagaagctttttactgacctagagttactgaaaaagaaggacaagtttttcttacatatagaaggaaaaaaattagcttatcaggttgatcgtattaaaatcgtaaaacctgataagtttgatgcgcttaaaattgaattggatcgagatttggtgacgttgttgacctgtaccccctatggagtaaacagtcattgcttactagttacgggacatcgaattgcctatccggttgaggcagcgaaaaaaatcaaggaaactgaaaaataccatcgtcggcgtgtgtactatttgattgcgggttgtgccttcttctcactgcttttcggatactttgtttggcgcaaaattatcctttatcaatcgaagaaacgcaattacacttttgtcttctatctatatgagaatggcgagcctttgccaggagtacgtgcattgcttacgcaaaaacgggatgttgttcgcataaatggcaagcttatccatacaatcagtgaccgattcgggaaaatcgaattcaaaaatattccaggcggtgtttatcgtgtagaaacggaaaatggattgagtgtaaaagggaagatttggcgattaaaagatcgtaagttcaaaattcttaaacgtcgcggatataagaacatcaagcagaaaattaaacactttattattgaaagtaagaaggtgaactaacgtgaagcaatcacctaagccgaaaagtgccagaaggcaattgattagcaagatttttatgattatagtctttttggtcggggtacttgtgatgatgtatccattttatatcaacgcagtcaatgactttattgaccaaaaacgaatggaagaagttcagcggcaaaacaaagaacagaacaaggaacaagtgcgcaaggctaaagagcggatgaaaaaacgcaatgaggagctaaagaagaatggtcttgtacctaaggctcctaaatttacaaatagtaatgaacggaaaatcgttagtgatgaatatattcgtgagcatttgattggagccgttagtattcctgcgattgaaatcactttgcctttgttcgacacaaccaatgaaaagctgttgcaagaaggggccactgttttgcagggaacctcatttccgactggtgggattaatacgcattcagttatttctgcacatagcggattgcctgagaaaaaactatttactgatttagaagacgtgaagataggtgaggttttcgtcatcacattgttcgaggaaaagctggcctatgaagtagataaaatcgatatcgttgaaccaaaggatacatccgtgattaatattgaacctggacgcgatatcgtgactttattgacttgtacgccctatatgatcaatagtcatcgattgctagtaacgggccatcgagtgccctatacagaaaaaatggcaaaagcgatcgaaaaggcagatgactcgcgaaaattgaaacaaatactggttttggttggcgttggactcaccattttgatactacttattggcatgtatcgtgtgatccatgcgtatcttttgagaaaacgacggttcaatttgaatcttcttcatacagacgtggcaggaaatgtattagctggacgagaatttgcgatgtacacgaagaatggaaaacgaccagtccaaagacaaggtattccactagtcacagtgacagatgaagctggacgagctcgttttgaaaatattccaggcggcgtttactgtatcaaggataacgagggtgtgggcttcaatgttggtattaaaaagctgcgtcaggaaaagattgatctctatctaaccaagcagcagaagaactacattttcactaaaaataatgcggttcagatcaaaaaatagggtcattgccaagcggcaatgacccttttctattaaattagcgataaatgattatcaatatctgattgtctgattggtctgtctttgctttgtgattctaagaacgcgattaatgattctttcgtgctatatgtatctaaaatatggtggatcgtatcacaaccttcgattctgatgcccgcatcgctatcgctgccgtaattataaatgaccgccgagggatgacaggtgatctgcatttcatgggcaatttgctgatcggtcaaaaaagcttcttggacaaaagccgaatgacgatcttctagaaacatttctaagtcaccgccaactttagtgaacagttggatcgccatttttttagaataaggttgattttgttcgcctactgctttttgtaactcaactaaaaagtcgcgtccacgcttttttccttgaaggtgggcagctttgacgtctaatgcagcagagtgaatctcttgagaaagttcggtccgcaattggatatctttttcagaggcgccgatacgttgcatgaattccgagactgttttcaaattcataataggaatcatgcgtaattgaattttcatatcatactgattgatcaagttgataatccgccgttcaatcgataaacatcttttcccaattggattaacaaataaataaatctcgatcactagatcccctccatttctaaattttttcttgctgcgcactcacagctcgagcaattttattttttgttttgcgataagggagttcgaacttgttaagtagttgcttaaaatccccctcattaaaattgtaatcaggcacttccaactctaattcaaaatcgtgataatcactgtaccaactttcatccaatgctagttttccttcagggatcgtgaactcagctcgttttgtgattaacttcccaattaggtgcaagtctgataatgaaatattgaatgttcgtagctgccccaaaatctctgttgcttgtggggtgaactgatctttattgatggcttgttctacttcatccagcgataaacggtcagtaacttctaataatccgactgtttgcggaattttcaaagtggcttcagctgtatcggagaagtatcgaattcttaatcccatccctcgctgttttaattgaaaatcagcagtgtcgaaatagagattcgtttgaattacgaattgtttattcgtaacattatagtagtgtaacaatttttcatagccattttgtgttaacatactcttgaattcgatttcaatttctttgctcactcttattttacctctgatcctaaaaaaatcctattataaaacatcctcacatagaataacctaaatagtcaaacgattagaactaattccatgaaaatgttagtattttgtaatatttggcataggagaaaaatgtgacaattttttctaatgaaggtttatgataagataagtaggaatggaaaatgaagcgggggatttgcgatggagagagattgggaaacatttcttgcgccctatgaattagcagtagctgaattaaaaataaaattacgcggattacgcaaacaatatcgcacgagcggagatcatgtaccgattgaatttgtgacgggacgtgtgaagccggtagagagtattcttaataaggcggagcttcgaggaattccgctagatcgtttagaagaagagatgtctgatatggcaggaatgcgtatcatgtgccagttcgtagaggatattcctctagtggtagatattttgcggcgtcgtaatgacatgaagattattcaagagcgagattatatcacgaatcggaaagctagtgggtatcgttcctatcatttggtcattgagtatccggttcagatgttagaaggagagaagaagttacttgctgagattcaaatcagaaccttatcaatgaacttttgggccactatagaacattcaatgaattacaaatacaaaggtcaaataccagaagatattcaaaaacgattgtttcgtgcagccgaagcagcctatcaattagatgaagaaatgtccagtattcgggacgagattcaagaagcgcagcatgtatttaatcgtaaggaacagaaaaaggaagtgggacagcatggggttaaggatcggaatcatccataatcaagaagaaaaatcgattcgagtgttgcagcgcctgcgcgggttgttggcagataaggatgatctagaggtcgtggatcgtgatccggaattggtgattacgattggtggggatgggacccttttgtcggcttttcatcgttacaatcatcgactaaacgaagtccgttttttaggagtccatacagggcatttagggttttatacggattggcgagattatgagctgcctgaattagttaatagtttaagttgcgaacaaggtaagagtgttagttatccattgttggatgttcttttgacgacaacagatggggaacaaaaacattttttggcattaaatgagtcaaccattcgtaagggaagccgtacgatggtagcggatgtttatataaaagaagaactatttgagcgctttcgaggcgacggattagcaatctccacaccaactggttcaacggcctataataaaagtgtcggtggtgcagtggttcatcctagtatcaatgcgatgcagttagcagaaatagcttcattgaataatcgtgttttccggacattaggctcacctagtatcattggttcccatgaatggatcgatgtccgactgaaaagtaatgagcagcatctaatcacaattgatcagttggatatcaatcgtaaaggtattacatcaatcaagtataaaatcgccgaagaacgcattcattttgcttcatatcggcatatgcatttttggcatcgagtaaaggatgcctttattcgagaggattaattttgtggaatttaaatggatttatcaagaatcaactgaatcacttgtacgcactttcttgaaacgtcaaggaatctcaaaaaagttattagcgaaaattaaatttcagggtggaaaaattttagtgaatgatacggaacaaaacgtcttgttttctttaaaaacccatgatattgtaactgttgtgattccggacgaggaagcgcatgaaacgttattggcagatgatgtaccaattgaaattatttttgaagatgagcatttgctagttgtaaataaaccagcgggaattgcatcgattccagcgcagtatcatcctcgaggaacaatggctaaccgagtcaaagcttattatgtggctcaaggatacgctgaccaagtagtacatgttgttacccgcttagatcgtgatacttccggactgatgctttttgccaagcatggatttgcacatgctaagctagaccaaagcctgcagcaaaagaaatttgtcaaaaaatatcaagcattggtctcaggtgacgtatatgctttagaagaacatggaaatatttccttaccgatcggtcgtgacttatcttctttattgagacggcaggtgatcgaaacaggacaaaaagctgaaacggaatactggctgaaaaaaagaaatcggcactgtgcattagttgacgttcaattacatacaggacgtacgcatcaaattcgagtacatttttcagcgattggctgtcctttgttgggtgatgagctatatgacggtgctctggatcaaggaatcgatcgacaggctcttcactgctattccttaacgtttcctcatcctttcaaaagagaacagctttcttttacgctgccattagccgaagatatggcgacaatagccaaaacgatttaaacagaagcaattattaaaacaagataggtaatgcatgtgtgaaaaaagtaaaagtagtaatatagtacaaacattttagtatccgaaacgagaatcgaactatttttttcatagaaaaaaataattcattaaaaacgaggtaggttgccagttctgctttaagcagtaattaacgtatgagtaaaaaaacaaaaagtaaaagtagtaatacaataaaagcagtctagcagaatggtatccgaaacgagaatcgaactatttttttcatagaaaaaaataattcattaaaaacgaggtaggtgagattgatggatgaaaaccaagaagaattagaagtacatttccaacaattacgggaggagctggatcagaatgatttgcaggcttttcgtgatcattttctggaaatgcatttttatgatcaagggcaattttatcaatctctaagtgaagaggaacgtcaactcgtttattcgtatctatcacccaaagaattagcagatatgtttgatgtcattgaagaagatgatgagcatatggatgaatacctaaatgagatgcggccccaatatgctgctgatatgctagctgaaatgtacactgataacgcagtggatttactgaatgagctagataagaaaacagtagcgaagtatctaagtctaatggattctgagcatgcgaatgagattcgtgaactgctccattatgaagatgacacagctggatcattgatgacgactgaatttgtctcaattgtcgcgaatcaaacgatgcgttcagctatgtatgttttgaaaaaagaagcccaaatcgctgagacaatctattatacttatgtagtgaatgatgataatcagctggttggggttatttcgttgcgtgatttgattgtaaatgaagacgatacaatggtttctgatgttatgagcgagcgggtgatttccgttcatgtcggcgatgaccaagaagatgtcgctcaaacatttcgtgactatgactttcttgctttgcctgtaacagactatgatgatcatttattgggaattgtaacggttgatgatattattgacgtaattgatgacgaggcagccagtgactactctggtttggccggggtcaatgtcgaagaggtggatgaaaatcctgttaaggcagcctctagaaggttgccatggttaatcactttgctgtttcttggaatgacgacggcgacactaattaatcattatgaagcactggttagtaaagcgagtattttggcggtgttcatttctctgattactgggacagcgggaaatgctggtacacaatcacttgcggtcgcagtacgtcgcttagcgatatctgatgataacgagaagaatttcgggaaactagtcgtaggcgaaattttgacaggcttagtgacaggcttagtaactggagtgacaatctttattattgttgggatttggaagcacaattttatcttaggtttcgtaatcggagctgcgatgatggccgctattacggttgcgacactagccgggagttggattccaatgataatggagaaattaggctttgatccagccgttgccagcggtccgtttattaccactttgagtgatttgaccagtgtattgatttattttaatatagccagtctctttatggagcgatttattggacattgaatgattagtaaaagacatatgctgaaagtagtgagaaaattttgaaaaaagcttatgccattgttatccggaatggattgattttgttagtccggcgtcaaggtgtgcctgtttgggatttgcctggaggcgaacttctttccaatgagaatgaacgagaaggaattcagcgcttaattaaagagcagctttcttttgatagtacaattgatgatttaattggaatttatacaaaagagtatcatgatgaagtgacatacgtttataaggtaaaggaaaaagtttcccaaagcaaaatggaatcgcaagattatgtggccttcaatttttttgatcttcaaaatttgccactaaacatttttccggatcgacatcgccaaatcaaagattataagacaggacgttatccagtacgcttgagttttaagggaaatcgttggtttattcgaattgaaaaattcattaaggaacgaaagaagagaagtgactcaaaatgagccacttctcttttaaattgatacgatttttgtcccgtgaagttcatttactcccagcgttttagcgattctttccgcattttctgcgttgataccaccgccaggtaaaataataatgcgaccagccgcgtaatcaatcaattcttttagatggggcagattgtcttctatagtagacgttaatggtccaccgtgagtcagtatgcgatcaatacctaagcgtgagaaccaatcgatggtcttaaattgttcttcttttgaaagctcatcaaacgccatatgaaaagtcgttaataccccttcgctactgcctagcagcatctctaaagcttcctcatcaacttcattatcttctgtaagacagccgaaaaccacgccatcagtcccagcattctttgcatgaatcaaatcgttttccatgattttcaactcaatatcattatagacaaaattcccgccgcgaggacgaatcatagtcatgacaggtacatgcttttccccagcataagctaagacttcttcaattactcccatacttggagttgttccgccagctgctaagttatcacatagttcaatacgtccagcgccagcttggatcgctttaggaatatcggtataattttcagcgcaaaattctttaatcatgattgtatcctccaaatcgagctaattttttttaaggtgatacttacgacgtatagtttagcatatcttgacgatagtaggaatagatgaactatgctatgataggatagcgaaaaggaagtgtaaagatgcttaaaaaaattgatcggggcgcgctgtttttagcgaagcagcaggcactatttcgctgtccaaagtgtcaccaagaaatgaatcaaatagaaaaaagcttaatctgcttaaacgggcatcgctttgatttagctaaaaagggtacgctttattttttagatcaccaaatcaaaacagaatatgacaacgaaatgtttgaaccgcgaggacgcatgattcgatcgggaatgtatcaacctgtgatagaaaaaattgcgcatttgataaaaccgggaaatcttttggatgtgggctgtggtgaggggagttttttgcaagaaatcaatcaagtaaatgctaatccagtaaatattggttttgacattgctaaggaaggtgtttatttagcaagtaatcaagcaatacatgctttttggtgtgtggctgatttgaccaatttgccatttgcagatcaatcctttgatacgctcttaaatattttttctccttcacattatagtgaatttaagcgagtgatgaagccggagggttgtgtagtcaaagtaattcctcaagttggctacctaaaggaacttcgagcgatttaccatccagatggggaagagtattccaatgaggcagttattcaacgtttcacagaagaacttaaaattgatcaccgtgaacgtgtgacttatgagtttgagataccgcaagaaaatcggttagatcttttagaaatgtcaccattggaatggcaggttacacctgaaataaaggccaagttagcagataatcctttgaaacgaattacgattgatatcgaaatattaaaaggatattagagaatacgctttcattcaaattcctgaaaatagaaggttgcatttgtgacttcgtgatgttatagtactaacaagttgtttttcattggtttttatcaggttcctgttctgataaaagttagtgaaaagtgcttcactaacgtagcgactcgccgtgctagacaccgagttggtacgttttttttgtcagttctgctttttgcagctttgttgaattcgaaaaggatacaaggtgtgaatgtattaccttttaacgagcagtttagcagaatgataggcgtacgaacatcgcttcatttttccggtctttggaaaaatgatttctttgcttgttatctagctgcgagttccacttcgcgtccttaacgcgattagtggaatcgcatgcgaaacgaagatggaaatatttttcggctttttgaaaaatacatccttacgaaattgagatagctgtcagaaaatcgattcattttccggtctttggaaaaatgatttctttgcttgtgatttagcaacgagttcagcttttcacagttactcgagacgtatagatgaattgtaatttgaggttagcagcgagcactttaattctaaacaatataaatacttcaaatagaatatatagcgaaaaatcatacttgaaataactacttataagattgaggaaacgaacatgacaaatcatattgtattatttgaaccacagattcctgcaaacacaggaaacattgcacgaacatgtgcagcaacgaattcaccactgcatttgatagaaccactaggtttttctacggatgacaaacatttaaaacgagctggtttagattactggaatgatgttaatattacttaccataagagcttagcagcatttctagagcatcttgaagaacgcccccttcatttgatcaccaaattcgctaatgcgacttattcagagattgattacactgatgacgccgaccactttttcatgtttggcaaggaaaccactggattaccagaagaatttatgcggaaaaacgaggataagtgtttacgcattccaatgaatgatgagcatgtacgttctttgaacctttctaacacagttgctttagtcgtctatgaagcgttacggcaacaaaattttccaaatttggaattgacgcatcattatgaaaacgataagttagattagacaataagaactcggaaagggatttttatgaaactttattttacacgtcacgggaaaactcgttggaatcaagaaaaacgttttcaaggaatgatgggcgattcgccgttgttaccagaaagtttggaagcgatcaaagcattgggcaaagagttaaaggatataccgtttgaaaaaatttatacaagtacattgaaacgggcttatctgactgctgaaggaattaacaagcaattggcacaaccaactgaaattgttcgttctgaagatttacgtgagctgggtttaggcagtttggaaggtcaattaattcctgttattgaagaacgctatcctaaagatatggtgaatttacgtcatcatttggagctttacgatccaactccttttgatggagagaaaattgaagatatgttgaaacgcatcaatgatttagtggaaaaagcagttgctgaatccaaggaaggtccattgctttttgtcggtcacggggccgcattaaccgcagcaatccaagcactgacaggaaaaccaatgagcgaactacgagagatgggcggcttatttaacaacagcctgacgattttagaagcggaaaatgctaaaccgccttatcaaatgatccaatggaatgatgttagttttttagaaggtacaggctcgaaaccagattcgttgctatagaaggtagaaaggaggcgcaaaatgtcggaagaacagctctatattgtaggaacgttaaaggcgatcttttttcaaaatcctagtaatttttataaggttctattgattaaagtgagtgagaccaacagtgattatcttgaacaggaaattgttgttacaggaagttttggcgatatgcaggaagatgaagactatcgctttttcggacattttgttgatcatcctcgatatggaaagcaatttctagttgaaagctacgagcaggcccatccaacttctgccaatggactaattaattatctttctagtgagaaatttccaggaatcggtaagaagaccgcggagaaaatcatcgaagttttaggtgaagaagccattgatcaaattatggaaaatcctgccgttttggcaaaagttccgaatttgaacgtgaagaaacaaaaagtcatcgtggagacaattcggcagaatcatggcatggagcagataattgttgggttaagtcgttatggtttcggcagccagctctcgtttgcgattttccaaacctaccgaaatgaggctttagaaatcattgccgaaaatccctatcaattggtagaggatattgagggaattggttttaaaaaagcggatagtttagctgaacaattgggcatcgcggcagatagtccacaacgaattcgtgccgcgatttttcatcaagtcaatgaggatgcgaatcaaagtggtgatacatatgttgaagcccaacagctattgtcagaagttttgcagttgttggagactgcacgaccagtagaaatttctccggatcaaattgccaatatgatcatccagttagttgaagaggaaaaaattcaacaagaggcaacaaaaatctatgagaatacgttattttatagtgaatggggaatagcctcttcgatcgaacgcttattggcacataaaaaagaaatcaattatccccagaaagtcatcgataaaaagctgcgtattattgaaaagcaattgaagatcacttatggcgattcgcaagatcaagcgatcaaagaagcgattcgttcgccattgttcattctgacgggtggtcccggaacagggaaaacgacagtgattaatggcattgtaaaattgttcgcggaattgaatgatctgtctttagatccgaaagattacacacaagcagtttttccgattctgttggcggcaccgactggccgtgctgcaaaacggatgaatgagacgaccggattaccggcaagtacgatccatcgcttgttaggattgaacgccaatgatgaaacaccggatattgaggcgaaagaactagatggcggattgttgattgtcgatgagatgtcgatggtggatacttggttggcgaataccctgttaaaggcaattcctaataatatgcaggtgatttttgtaggagataaggatcagctgccctccgttgggccgggtcaggtttttcatgatttgttacagattgaagacattccaaagatggagctgacggatatttaccgtcaaggcgatggttcatcgatcattccgttagcacatgagatcaaagatggaaaactgccgcaagactttcggaaaaatcaacaggatcgttcctttattgcttgtcatgcctttcagatggaggaagttatcaagcaggtcgtggaacgggcgaagaaaaagggctttactgcacaagatgtgcaggtcctagctccaatgtatcgcggacctgctggaatcgatgcgatcaataagatgatgcaggaaatttttaatcctaatgacggccgaaaaaaagaagtccaatggaatgatgtcgtttatcggattggtgataaagttttgcaactggtcaataatccagaattgaatgtatttaatggcgatatggggattatagttgggatcattccggcaaaagaatcggaagataaagtggatgaactggtgatccagtttgatagtaatgaggtcagctataaacgttctgaatggaataaaatcaagctttcatattgttgttcgatccacaaatcacaggggagcgaattcaaaatggtactcttgccgatggtgaagcaatattcacgaatgttgcagaggaaccttttatataccgcggtaacccgaagtaaggatttattgattctattaggagaggaagaagccttccaagcctgtgtcgtaagagaatcagcggtgcgaaaaactaccttgattgaacgaatcatgaaggggaccgagattgcaccgacaaaaccaaaagcagaaccatttaaagcagtagaagaaaagcaaaagttagcagcagacgagccgacaattttgacgccaaaattgattgccgctcaaacgattgatccgatgattggaatggcagatgttacgcctgcgatgtttatgtaaaaaggactgaaaaataaggctcttcgtcaaatcgtgttggtgaagacaaatttgaataaaacttagtccgatatgcggcgcgttctgtgcgccgcatatttttttagttttcaaagatcagaccttgttgtaaatagatccgtgcccgaaagttataaaagttgcgataaccaaacgcaattcgtttaatcagcttgatcttgttattcagcccctccgtgacaccgtttgagtgggacactttaaaggcatttgaaatgcccgattggtagcgatggaagatcgtgaatttctttttaaacgactgaggtaacgtagatgaaattgttttaagggtttcttgaaagccttccgtatctcgtttaacgaaataatagcgtaataattgacaaaaatgatacgctgttcgcaattcttcgttgtagcttaacagttcatcgacgatttctgtttgactaattggtcgtttaaacagtcgatgataatgccgtttgagtggctccaatgtcgtggaatctttgagtaagagtttccaatatcgcttgagccgacggtacttcttctgattttcagagtgtgaggttcgaaaacgattcatgatctggacacgtaattgattgaaactgcgattgatgtgttggacaatatgaaagcggtcagttacgatctccgcatttggaaagaccgttttaagcaactgacaatagctggcattcatgtccatcactaggtacttgacctttaaacgggcctttctaggaaagcgcaggaagtattgagttagtttgtaaagtctgcgatcttcaaggatcgtaaatagctgattggttgtcccatcaacacaaataaaactcatggaaccagaaacagacttcattgatttgaactcatccatacacaacaccgtcggaaggaagttcatacgtggctggtaatgcttcgttgcttcacgcaagatccgtgtcaccgtcccatccgagacgaagtacttcttagcgattagtttacgtgattgattttcgtacagttccatgagaatcgcctgcttcagttcctttgttagttgatgatgttcatcaactaagtccgttttcgcagaaaaggtccgtccacaatcatggcagagaaaacgggtacgttttaattctaaaatagttaacttttctttgactttcaacatctgagtgcgtgtcgtataggaaccgttgcggataatacgaaccgatcgacagtgttcacaacaggaaggagagtcatccaattttcctttaataaactgcgcttgaacgcctttatattctttttcaatcagccattcttcatcaaaaaataaatgtttatctgttaatccgagtaattttctagtatgattatccattgagagactcctttggtagggtgacgttttggtcgactaaattttaccaaaagtgagtctctttttgagttgaaacgaagaaaaaagtgttagtagaaaatcgccttcgattttccaccaacacaaaatattatagaaccaaaaataaagcagtggctttatttttcagtccttttgtctgcataccaaatatattgtgtggcggtcgagaagttcatgtcaaaggagcgttctcccatatcttctccgtcagcttgaccatgctgcggtacaaccgaaacaattcggattttactactagtaaaatgtttgtagtgcttgttttctgtatgttttttccgtactagctgaattaagaaacgcagaatagctaggagattcggtttttctacgacgactagatcaatcgtctctttttttggatcagccattggcgcgatcgctattccaccaccgaaataagggatgttcgtggtcgtacataaaaaagtacgctcaaagctcaatgtttggccatttaattctacgagaattggaaacgtcttttgagtgaaaatcgcttttactagatacaaggcataagaggctgagcccaaatgatacttgttcaatactttttttgacgtagaggcattcgttgtcgcaacgattaatgcatctagaccgatcccgacattgtttaaaatgactccttgctcttcgcgaattttttcttcgtaatggaaaacattaatcggttgtggctttaatgcggaggtaatctgttcaaaggctttttctggctcacgcgataagccaattcctcgagcaaaatcatttcctgaaccagcaggaatatagctgacaggaagttgcaaacctaacgcaaagaattcattgaccacttgatggagtgtgccatcaccgccaatcaccactaacaggtgaaacgaattgtcgatgtgatccttctcgcaagtctctgaccaagggcttagcaaattggttagccggtcaacaatctctttttcatcgccaggcccttccgtataataaggtgtgtatgtatagtctccttcatcgagtaattggatgattttttctgctgttttttccgcgttaccgctaccggctgcgggattgattaaaatatgataatgaaaattcatgtcctcgatcctttcaaagactgattataacagagtaacgaaaggaacagtagaaaattgacccattttttatcaaacgaacatgcaaaaaaatcctatgaaaagaattctagccatctaagctttcaatgcttggttaataaaccagtcgatgactttttgatcataatttgttgcttgataattttgatttacaaaggctgctttgttgctcttttttatatctactactaaattactccaaagataaagcgagatatgggtttcagtattttctattctatatttttctattaatggggctcgtgtactgcaacacccgtaatttccatgagaccagcgatctttgataacagcttcgccatctcgttgcgcctttttatataattcgacaatttcattgtcaatacctaacataccgttcacccttctttcgaaaaaagtatcttctacaacttgattgtaccacctgaagctcgaaagaatccattttgataaactaatcaaaatagattccagagttgacttatattctgaaaaaacgtatgctgtaaaaggtttacagcggttcatcaaccatcccgctttaaaaaaactcggagaaagaaggacaattatgaatatggtggaaagaaagcgtgtcactgttgtagtgaccaatgggattattatggcgctctatttggctttgacaattttagtgtcgccagttgcatcaggagcgattcaatttcgtatctcagaaagtttaaatcatttagttgtgtttaatcgaaaatatttatggggcatttttggcggagttgtcgtttacaatgcgatttttggtatgggctggctcgatgtcgtttttggcggcggacaaactttgttggcgttaacgttgacagctgttttacaaaatgtcataaaaaatacaaagattcgtttagctttaaatgttgtattcttcagtgccagcatgtttttaattgcattgatgctgaatctaacagcccaactacctttttggccaacgtacggttggacggcattgagtgaagcgatcatcatgacgatctcggcaccaattatgtactatctaaataaacgtttgcattttgcaaatcaactataaaaaaatggcggtcctattatcaggatcgccatttctatttgaaaaattagtcttgcatagacaaagcttcaacttcttgaatctcaaaatgtttacgttcaaggtgatcaataatttgattcattttattttcatctacaccagcaggtaaggtgaacaaagtacgccgccccttgaaatctttaccaacatctaacgtgatacaacttgcgatcgttgtaaattttgagatgatctttgacatggctgccagatctccacgttttccagtagatacaacggtgattacgtaactacctgtttggatattccaagattgcgagagcatatttaataaggtactgtgagtgagaatcccataaaaatgatgatcctcatctaagacggtaatatatggtaattctttaatcgtaaaaaagattttaaaaaaagaagtatctaacgaaataaattttgtcgcatttttcagcaaatgagtgactgggagatccatgtcgccgccatttgccttgtgccggtaaatatgcattttgtagatattgcctcggaaaatttgatcactttcatcaaggatcggaacacaacgaaatccagtaccttccaatatgtccaatgcctcttgcaatgtcgttgattcgttgatcgttgtcaaattctctttgggataaacgagactttttaataacatccaataaccctccaataaagctattcattctttcatcatattatcatattctacctgataaagaaatttattttggaaacaattccaattgattatttaagtactgaagaaaggactgtgatgtttatgaaatattgacagcaaaaaggatagatgataatgttagtctgtgactttatgaggttatcattcttgtttcaccagaaaaatgaatacattaataggaattaggagtagatcgctatggcaacaaaaaaagcggctctagcctgcactgtctgtggttcaaggaactacacgaaatcagtgagcgaaggcaagcgcggagagcgtttagagattaataagttttgcaaacattgtaatcagtatacgatacataaagaaacgaaatagggggagaattaattgaattttttacgtagtgtaagagaagagatgaagcttgtttcatggccttcaaaaaaacaattacgccatgattcattggtcgttattgagacagcaatcatttttgctttgatgtttttcatcatggatacagcgattcaagcactgatcaatttgatcattcgctagtagccaattcaaaaaaagcatgttatactatttgtgagaaaaaaccttgggtctgctgaggtttttttattttagaacgaggagccgatggcgaaaatggaatcttttgaaaaacaatggtatgtgttgcatacttattccggctatgaaaacaaagtaaaagcaaacttagaatcacgtgcgcaaagtatgcggatggaagactatattttccgtgtagttgtcccagaagaaaaggaaacagaagttaagggcggtaaagaaaaagaaatcgttcataaaacatttcctgggtatgtgttagtagaaatggtcatgactgatgattcttggtatgttgtacgtaatacaccaggtgtaacagggtttgttggttcccacggtgccggaagtaaaccagcaccattgatgccagaggaaatcaatcatatcttacgatcattaggtatgagtactcgtcaacacgatcttgaagtagaagttggcgaaacagtgaaaatcatcgaaggtgctttcgccggtcttgaaggtgtgatcactgaaattgatgaagaacgtgataaaatcaaagcgaacattgacatgttcggacgcgaaacaagtactgagttagatttcgatcaagttgataaaatttagatctacgagccgaggcagctgccttggcttttttatgtttttttagatacaagcggtacaattgctaaatttccgctaacttctaagcgtgtcattgagttatacgacctttaaaactatagtagagtgaaacacgccataaatatgtcatagtgaagtggagttgaaagaatgaaaaaagtattcttgagcattgttgcaggactaaccgttttattgctcgttggttgtggaagcaagcaaacaaaagaagtggaaaaaacacaagcatcagcattaacccaaaaaaaggatgatccagcttttaagaaaagcgcggtgccaaccgtttttattcacggctatggggggaccattaattcctttggtgggatgatccagcgactttcaagcgaaaggaaaactacgaaggaaatgctgattacggttcaatcagatagttctttaaaggttgatggtgaactgagtaagaaaaaggataatccaactatccaagtcttgtttactgccaataaagatactgaatggaatcaaacggaatggatctatacggttttaaaatatttaaagcaacagggagtggagcaagtaaatcttgttggacactcgatgggcggtgttagttcactgcgctatttaacaacctatggtcaaccaaaagatgcttcgacgataaacaaatttatttcaatcggagcgccatttaatgattttacagaatcatctgaatcgattgatgatatattaagaaacgggccaagtgtaaaagccggcagatacatagattatcagaatggcattgctaatgtacctaataaattgccgatattattattagctgggaaaataaatcaggagacagttacagatgggactgttcctctccatagtgcattagcaacattttctttattgaaagatcatagaaatcctatcaaatatcaaatttttactggcccaaatgcccagcatagtcaattacatgagaatcttgacgttgataaaactgtcgcggattttttgtggaattaagcagtctctgttggtcgttccggtttatctgagtaaggctggaatagaagacaagttacttgcttactttttgtaagagtattatgataattcttgtattaaaaagaaagaaggatttatcatgacttatcaagcaagtaacgaagaacatccaattgaaatcgtgaatattgcttcactcgaaggtcgggtgaaagaacgcatggaaaaaggtgcgtttggttatattcgtggcggttctgaagatgaatggacaatgaaagaaaacacctcttcatttaataaaaaaacaattatgcctcgggttttgcgaggaattgatcatgctgacttaagtacgaaactttgggacatggatttggcaactccaattatccaagcgccatcagctgcacaaggattagctcatgaaaaaggtgaagctgataccgctaaaggagtggctgatgctggttcgatcttttcgatcagtacctatgctaatacaacgattgaagatgcggcggctgcagcacccaatgcacctcaatttttccaattgtatatgagtaaagatgatggctttaatgcgttcatcttagaaaaagctgttaaagctggagcaaaagcaattatcttaacagcagattctacgcttggcggatatcgcgaagaagatattgttaataaattccaatttccgcttccaatgcctaacttagctgcttatagcgctaaaagtgctagcggagatggtgaaggaaaaggtatcgcagaaatctatgcagcggctaaacaaggtttagtacctgaagatatcaagaaaatcaaagacttaactagcttgccagttttcgtgaaggggattcaatcaccagaagatgccgaagttgccatcgcagctggagctgacgggatttgggtttcaaatcatgggggtcgtcaactagatggcggaccggcatcatttgacgtattgccattgatcactggcgttgtaaacaagcgtgtaccgatcgtatttgatagcggtgttcgtcgcggtgaacatgtcttcaaggctttggccagtggggctgacctagtagcaatcggtcgaccagtcatttacgggttaaatttaggcggtgctgaaggtgtgaaatcagtttttgatcatttgaacaaagagctttccatcacaatgcaacttgctggaactaaaacgatcaatgaagtaaaaaatacaagactacatgatacaaaataattagtatgaaagcttcaccaagaaaaacctcttcttggtgaagtttttttcttttttcttgcatacgccttctttttagcttatcattaactaaaatattaggttagcctaaaatagaaaagagggatagaaatggaaacgattcgtatcgaaaatctttcggttgcatatcgcgggaagattgcattggagcatgtgaatttggaactatctgctgggaaattaacaggaatcgtcgggcctaatggtgccggaaaatctaccttaatgaaaggggtactgcaattgattaaaatacaatcaggcagaatttattatggcactgagccacttaataaacagcgggaaaaaattgcctatgtagagcagcgtcaagacattgatttgagtttccctattgatgtttttggggtagttttattcgggacctatccgcatttaaaaatatttcaacgcccaggaaaaaaagagaagacatttgccctagaatgcttgaggaaggttggactgtctgaatatgcaggacggcaaattagtgagctatcgggcggacagctacaaagagtctttattgcacgagcactggcgcaaaaggcggaatggattttattagatgagccctttgccgggattgatgcaactagtgagaaaattattatcgaattacttaaggaattgcgggatgaaggaaaatcgatcgtgatcgtccaccatgatctccataagataacggattattttgatgaggtgatcttattgaacaaaggattgattgcgtctggaccagtcgctcaaacttatacatcgcagaatatggaaagaacttacggcagtgaaattacacaaatgttaagagtgggaggtgcggactttgcttcatgatttttttcaaggactaatggaataccaatttttacaaaacgcattgattacctcgattatggtgggcatatctgcgggtgtgattggctcttttatcattctcagaggcatgtcattaatgggagatgcgatttctcatgcggttttaccaggggtagcgatctcctatatgttagggagtagctatatcattggcgcgactttttttggaattttttcagcagcattgatcggctttgtcggaaaacatagtcgtctaaaaaatgataccgcgatcggaattgtttttagttccttttttgctttaggaatcattctgatctcttttgctcggagtgcaacagatctttatcatattctttttggcaatgttttagcagttcgtgattcagatatgtatctgacagcgcttgttatgataatcgttgttttagcggtattgctattttataagcaattaaaactaacttcctttgctccaacgatggcgcaatcttatggctggaatatcagcttgattaactatggcttgatgtttctgctgacattagtcgctgtaacgtcattgcaaacagttggtacgattctagtcattgcgatgctgatcacaccagcggctacggcctaccagttaaccaataagctttctatcatggttggtttatcaacagcatttggtgtttttagtgcgatcatcggtttgtatttcagctatagttacaatcttccgtcaggcgcaacgattgtgatgacagcggcgatctttttcatcgcagcatttttattttcaccaagtaaaggcttgattcaacaagtaagaaaggaacgtatgtatgaagcataaaaaaatattttttgcaggtatggtcggtttacttctactcacaggctgtgggtcacggagtagtgaacatgttgagaaaaatagctcaaagaagctatctatagtcgcgacaaattcgatcattgcagatatgatcaaagaggtcggaaaagatgaggtgagtgttcacagtatcgtaccagttgggacagatccgcacgagtacgagccgttaccagaagatataaaaaaaaccagcgaagcagatgttgttttctataacggcctgaacttagaaacaggtaatggctggtttgacaaattaatggacacggctaagaaaaaagagaataaagactattttgcagtcagtaaagaagttgaaccaattcacctgaccagtaacagtaagcaagaagacccacatgcttggttggatatcactaacgggattttatatgtgaagcaaatccaagctgttttgagcgatcaagatcctgataatcgattggattacgagagaaatgcgggagcttacattagaaagcttaaagaactagatgcttcagcgaaagaaaaatttgccgatattcccattgagaaaaagttgttagtaaccagtgaaggagcttttaagtatttttcaaaggcttatgatttaactgcagcttatatatgggaaatcaatacggaaagtcagggaacaccagaacaaatgaaacaaatcgtcgaaaaggtacgtgcatcggaagtcccttcattgtttgttgagacgagtgttgatagacgcagcatggaacggttatcaaaagaagttgatctgccgatttatagcgatttattcactgattcattagctaaaaaaggaaagccaggggatagctactatagcatgatgaagtggaacttagataaaattcacgaaggattgatgaaataacaaaagcagctgactggcaatcagctgcttttcattattttaaacggtagccttttctggttcgccaaagacttgtttttgtagacgtaacccagttggagtggttgctacgccgccttctgcagtttctttgaaaatttgcggcattgcacgcccaaccttatacattgcctctaccacttcatccggtggaatgacgctgcggatgccggctaacgccatatctgcggagataaatgcttgagaagcgcccatcgcatttcgtttaacacacggcacttcaactaaaccggcaacgggatcacaaatgagtcccatcacattttttaaggtaatggcaagtgcatttgcggccatttcaggtgtgccgccatttgcagtaactaaggccgcagctgacatggcactggcagaaccgacctcggcctgacatccgccttcagcaccagagattgaggcgttatttgccattactaaaccaaacgcaccagctgtaaataggaaatcaatctgttcatcatgagtcaaatttagtttttctcgtgccgccattaaaacaccaggtagtacgccggcgctaccagcagtaggggtggcacaaactaagcccatcttagcattgacttcattgaccgctatcccgttacgaacggctttcaaaatcgtttcgccgctcatgaatttgccgctttcgatataatcgttcatacgtttagcatcgcccccagtaatccgggttacggaggttactccttgaatgccttcctcgattgaactttccattacttctagattgcgttccattaacgcaatgatttcttcacgagttcgatcagttaactccatttcagtcgcgatcatcaattcgccgacagtcggataatcctttgcttgttctacaagctcttggattgaataaaacatgacaattcctcctatgctatttgaaataagtaacgctcagcacatcgtcttcacgtttaatctcttgtcttaacccttctggatcatctggtgtatcatcaatttctaacaaaacaatgccgttttcgcctcgtgttttacgagtcattgtaacttttccgatattcaagccgtgtttcataaagatggtagatacacgagaaagaagaccaggcacatccttattaatgatgatataggttggattccccataccaagggagatactgtagccgttcatttcagtgatttgaatattcccgccaccaattgaaacaccagtaacggacatctctaaatcacctttaatcatgcgcaaggtaacagtattcggatgatcggcgatttcttttttgggaacgaatagcacttccataccttgttcgtgagcaattttcaatgaatcagataggcgaggatcgtcaggttccattcctaaaattccacctactaaagcaatatctgtcccgtgtccacgataagtcttagcgaaagattcatacaaatcaaactctacagagtccggacgctcaccgaaaatcattcggcaaacttttccaattcgtgcagcaccagcagtatgtgagctacttggtccaaccatcactggaccaataatgtcaaaaacacttcgatattttaatacttccattattttaagcctccctaaattatccgatgaaagtcctcatcaagtcgaccatagtgtaacatatacgctttcagaaaatagttagattaataatttattttgttattctcataatagttaaagggtttgtgaagcgttttattattgtcagaaaagttcgaatagataatttttttcttgcgttcgttgaagaattctgatatgataccaaagtgtgtctttgagcacacgttttaaagtgggaggagaaattttgatctccaattaaccacatcacggactcaaggaggtatgtctcgtggcaaaaaaagtagaaaaattagttaaattgcaaattcctgcagggaaagcaacaccagctcccccagtaggtcctgcactaggtcaagcgggtatcaacatcatgggattcacaaaagaattcaatgctcgtacagctgatcaagcaggtttgatcattccagttgtgatctctgtatatgaagaccgttcatttacattcatcacaaaaacaccgccagctgccgtattattgaaaaaagcagcgaagatcgaaaaaggatcaggcgaaccaaacaaaaacaaagttgcaaaagttactagcgatcaagtaaaagaaatcgctgagttgaaaatgcaagacctaaacgctgctaacgttgagtcagcaatgcgcatggttgaaggaactgcacgaagcatgggtatcactgtcgaataattgtcgttgtacccaagaaagtagcttctcagttggctccctatctaaagatacggaacacgtgggaggttctaccgttataaccacatcaaggaggaaacaaaatggctaaaaagagcaaaaaaatgcaagatgcattaaaaaaagttgatactactaaagcttacccagttgcggaagcagtagcattggcaaaagaaattaacttcgcgaaatttgacgcaacggttgaagttgcttataaattgaacgttgatcctaaaaaagcagaccaacaaatccgtggagcagttgtgcttccaaacggaactggtaaaactcaaactgttttagtattcgctaaaggcgaaaaagcaaaagaagctgaagccgctggcgctgatttcgttggcgacgacgacatggttgcaaaaatccaaggtggatggttcgactttgacgttgttgtggcaacacctgatatgatggctacagttggtaaattaggccgtgtgcttgggccaaaaggtttaatgcctaaccctaaaactggtactgtaacaatggatgttacaaaagctgttgaagaagttaaagctggtaaagtaacgtaccgtgttgataaagctggtaacgttcatgtgccaatcggtaaagtatcattcgacgatgcgaaattggttgaaaactttaacacaatcaacgaaactttagtaaaagcaaaacctgcgactgctaaaggtcaatacatcaaaaacatttcaatgacaacaacatttggacctggtatccatgttgaacaaactgctatctaattaattttagaaaagtacttgactcggctagcttatctatgataagttagtcgaggttaaatattaactgtaccgaagacagtaggtgacgcaagtcttaatttcctaccgaggacgtttattgagaacattcaatagtccctctatgtctacggtggcatagggtatttttttgcttttagtaaaaaatgctcttccatcaaaatcaggaggtgaaatatataatgagtgaagtagcaatcgctaaaaaagccgctatcgttgatgaagtcactgaaaaattcagcgcagcagcttcagccgttatcgttgattaccgtggtttaacagtagaacaagtgactgatttacgtaaacaattacgcgacgctaacgttgaaatgaaagttatcaaaaattctatcttggttcgtgctgctgaaaaagctggcttgaacggattagaagaagtattctcaggacctactgcagtagcatttagtaatgaggatgtagttgctccagctaaaattatcgacgagttcgctagtaaagctgacaaactagaaatcaaaggcggtatcattgaaggaaaagtagcttctatcgaagaaattactgctcttgcaaaactaccgaaccgcgatggacttctttctatgctattatctgtccttcaagcgccagtccgcaacgtggcttacgctgtgaaagcagtcgcagaaaaagaagaagaagtagcttaatcgctgcataaaatataaactaaaaaaacttacctaaacggaggaaatttaaaatggcattgaacattgaaaacattgtcgaagaacttaaaggcgcgacaatcttagaattaaacgacttagttaaagctatcgaagacgaatttggcgtaactgctgctgctcctgtagctgctgctggcgctgttgcaggtcctgctgctgaagaacaaacagaatttactgttgaattaacagctgttggcgatcaaaaagttaaagttatcaaagcagttcgtgaagcaactggtcttggcttgaaagaagctaaagctgtagttgatggcgctcctgcaccagttaaagaagatgtatctaaagaagacgctgaagcacttaaagctgctttagaagaagttggcgcatctgtaacattaaaataatcacttttgattattcaaagggagatctgatttcaggtctctcttttttttgcttaaaggaacattttttcgatcacagtgaagcgtgaaaacaataatgaagtgaacatatttttgcttctatcacggaatgagagaaccttgttttatatgtgatgagtagtttaaaaaatacgaattaaatgatgcttttaacagtgaagctaaaaaagccgagctattgaaatgctcggctaacaataataaatgtattttattgtagaacttctagcataacatctgattggtctgctgggacgtttccagcataattcggtgtagctaaagaaagtctgccatgtttattatggaataagtatagatttccagattgattgtttctatttgttgcaccagatatctgaataccaatcgaaagcatggtactcaccttaactgttcgaaattcatttgtctctgctgaaaatattcggattgattttactgggacatcttgcatcctaaaattataaacggtctcattattggtatcagcattgaaagtgatttggtttgtgttcgtgttaatatttattgaatcaggtacattgataccattaaaatagaaggtcgcatacccaccgaattcatcagcagtaacggtatccacctcagactgtttagtagatgtggattcagaagaaaataactggctacttgaactaccggacaaggatgctgctgaatatgtgaagctcgatgagcctttactacgttctgagctttctgttgtactcgcttcactggtagaacttttatcagattcctgtgatggaccacgattgcacccaacaagcaagaacgatgtaacgagacaaatcgaaaaaaactttttcaaagacaaacctcccttcgtaataaattatagcactaaacaattttattgtaatcgtttacaaataatttgtcatttttaccaaaaatgcatctttgttgaattaaaacattcaagttttgagcaatatctttgtatcatcaagtaataacgcgtagactattaatcaagaagaagaaaaggactgatgctttttgaaaaaaatgtatgaaacagcaatgattaaccacggcgggcgtactggcgatgttcaagcgccaaacggtagtatgaaaatgaagattgagccaccttctattcacgcagaaggaacaaaccctgagcaactttttgcggcgggttacgcttcttgtttcaacggtgcagttcatcatatgttgaaggaacacaatcttgagtcagatgcagaagtcaaggcacgtgtatccttgtatcaactagatgacggcggttatcaaatcggagtgattttggaaacttcattacctggagtagaaaaagaagaagctcaaaaaattattgaagaagcacacgaattttgtccctattcaaaagcaacgcggggaaacatcgatgtagaagttgaattggtctagcaagtgcatccctcgaattttcgagggattttctattttcattgattttcattgtattgtgaaaattaatgaaataacgctttttatctaaaaaaaatttcagttaattagcaaaaaagagaaaaaaataagaggctattcttatcactttacaaaaaattgggaattaactaaacttgaatctcaatgattttgtaaaggatgtgttatgaaaatgaagaaatacttagcagaatttctaggtacctttatgctagtttttctaggaactggtacagtcgttgttgctaaaggtggcacgctgacgattggtttagcttttggtttggcgatcacgattatggcgtatgctgtgggtggtatttcaggaggaaacttcaatcccggtgtatctattgcaatgatgatcaacaaacgtctaaaagtgaaggatgggattttttatatcatcgcccaagcattaggttcgattgtagcttcagcaattttatttatttatgttcatgcgctaaaattacctagcgacggctttggtcaaacggattttcctaacatcagtgctgctcaagcatttggtgtagaaacattaatcactttcctattcgtattcgtaatcttaatggttacgagtgaaaaatacggcaatgctcaaatggctccgttagccatcggtatcacgttagcattcttgattatcgttgctttaaatttaactggtgggtcattgaatgctgctcgtagtttaggaccagctatttttgctggcggcagtgctttatcacactattgggtatacttactagcaccaacattaggagctgtgattgctgcatttgttgcgaaattcatggtcagtgaagaaaaataattttttattgaaggcgatcatgaaggtcgtcttttttgtatatgtaaatcaataaaaaagaaatttcattccaatagaaaaacgagcggaactcagtatcctgctcgttttttgcatttaaatgaatcaaagcgttttttgaatttttgtgaggtggtatagatagtacccaataacgaaaaggtaagcaataaccatcggaattatgacgttaaaggagatgcccattaaagcgaaggttaataataacgcagagtaaatatacaacataatatcgaaaccttttgctttggccatatttccgatcattacgtttcgttcatctttcgtgtcgatttcaacttgcttagctagtttgggatttttttcgattgtttttttactgacgaagtctccgattccatttccaaataaaccgcatcctaatccgatgcaaagataaggtaaagttttcataataccttgagaattatcaactgtttttattaaatagaaacctacaccgatcaacgtcacacctgctagagtgatcaatagttcttttgtcttcttcattattcttcctcctcccgtaaaggaacaatctataaagtatttgattaaggaaagtttactttacatttatagtataaagcacaatgttgtttatgtaaagcatgctttccataacgtgtaaaataaaagtcgcatcgatccagaatagatcgatacgacaagttttagatgtgttcagaaactgtagctgactgttttttacgatagctgaaaagaatgattaagtagatacatgcggtaaaaagtgttactccaattggattattcatcagaatgccaacgaagattaatcccaaaacaaggattactaatccactaaagaatttttcggcctttgtccctttttttaaggccaatacaaagactgccacactgattagtaaccaagttagtaaaacggaatacgataatgaccccaccaaataattaaacaacttatttcctagaaaataggacaagatgactccaaggtaaagagtacctgtacagaataaaacggcacgttgaggtacttgatgcttattcaaaacagctaactttgaagtaaagccggcattttctttcactcggaagtatagcgttctagaagaagcgtagacacctgagttgatcgaagaaaatagagctaacacaattacaaagtttacaatgtcaatagcaaacggaatatgcattttttgaaagaccatcacgaacgggctagcagtagttgacgccaaagtatcccaacgatagataatcaaaagcaagaccatcggcacaatataaaaagagataattcttcccattacacctttgatggctttagggattgctgttttaggattctctgtttcactaacagtaattgcgatcaattcagaaccgccataagaataaattacgacgagaagagaattgacaagaccgtttaatccatgaggtgtgaagccaccgtgactgttcatgcgagatatcgtatcgacaaaaccaatatcaaaaatctcacgtccgactaaataagcgctaaaaacgatcaaaattataataacagcgattttgatgaaagctaaccaatactctgtttctgcaaatagtcgaacagagtacaaattgattaacgtagtcagtagagctaggattagcacaaatacccaagagggaacgtgtggaaaccacagctgcataaagcttgctgccgcaactgcttcagcgataatattgaccatccataaggaccagtacaaccaatcaataaaatcagccgttctttcgccaaggaaaggtttgatgattcctgacaaaccttgaacattgtcgctgtccaagactaaacgtcccagtccattcatcacaataaagagaactaaaccgcctagtagaaaggccaggattacggaaggaccagcaattccgatcgcctctccgctgcctttgaataatcctgcgccaatcgcgccgcctaacgccaacatcatgatgtgacgagaggtcatttgtttttgtaatttattttccattagaatgcctcgtttcaataatagatagaatagtttgtagatttgaaatattctgataattatttgactataataccaaaatattctgacaattctactttcatgaaaaatatttcattttattttcatttagcagctataaatggctagtgttagttattttataagctaaattaaatgaaatttgatcaaataagcggttaaaacttttttcgttaattaaatcagttgaaaatcttcattttctaatactttactgtttttcctttcaattttttctcagcttaggaaatttatgaaattagtaacgaaatagccataaatgctgattctatagtgtttttatagtgtttaataaaagtaaactattgattttcaagcaagataataggaaaaaaggaatcttatttgtaacataatagagtaattattttatatagaaagagggagagaagaatgagttggttatggacattaattattggcgcattgatcggtgtaatcgctggagcaattactaaaaaaggtggttcaatgggatggatcgctaatattgttgccggtttagtaggttctgcaattggtcaagccttacttggctcatggggccctagcttagcaggtatggcactggttccttctattattggtgctgtgattgttgttgcagtggtttcattctttattggaagaaaatagaaatatggactcaaaataaaaaagcgcaaaggcgcttttttattttgcattcaacaattcttctttggcatggatcagttgagtcaaaaaggcacagtagggtgtatcgatttgatagttcttgcctttttgccaaacggcaccattgatatagtcaatctctgttttccgataattgcgaatcaagtcctgatacattgatggaaaatgcaatccttgtgttttgacatcataagtggcttcgatcgcttgaatgacttgtgcttgatttagttcaattccttcagctttagcgactgcggcaaactcaccgacaattgtttcaatgaaatttctagctacacttagtgaaccaaactcagcgatattacaatctaaaattgtacataatccattcagagtaccattgatacaggcctttttccaaatggagtagcgcacattattactatagatgggatttagttttgctttttgaaaaacttccaagaccttcaaagtaaaagcttttcctttcggatctaaattttccatttcgatactacctgtcccgacaagttttgcatgaccaggaccggctagaccagctgtccaagtggttgtaccgaaaataatattttcttttggcacgaattttgacagagtttcttcatgtcccaaaccatttaataggcaaaagacgaacgtgcttttactgatgattggctgtatatcctgaaacattgcttcaagctgcatcgatttggttaaagcaacgactaaatcaacattggcatgatcctctacgatttcttcgggtgaataaatcggcagatgagcaattacctcatgatcttcaaattctccgatcaatcctttttcacgtatagcgttaatatgatccggccagcgatcaattaaaatgacctcattgccagcttgatgaagcatcaatccgatgcgactccccatagcacctgctccagcaattgcgattttcatatctataattcccctttcaagttccattgactagtatacataaaaagccgtaaaaagacggattaggcgctcaattacgaaatgatatttcatcagtatatatataattatgaaatagtattgcattttgtactgttagcgtttataatcacttcataaagttgaaatggttttcacagggagtgatgattttagaatctcctgtaaaacaagactgtaagacaacttaggaaacagatattttcctagccaaaaggaggaagctgatgtttggattttcaattttcttaaatgaaggattaacaagggatacaacacagtatataaaggaaatggcagaatacggtttttctggtattttcacgtccttgcatatcccggaagatgatgcatcgcaatatcgtaagcgcttgactgatttaggatctatcgccaaaacctatcaattagagttgatggttgatatctctggtgaagcgttggatcgcgcaggtttttcctttaagcatttgagagagcttaaagaaattggtgtgacaggattacgaatggattatcacattagtaatcaacagattgctgaattatctcaagaaatgaccattgcattgaatgcttcgacgattactgagatagacatccaagaattacgtgaagcaaatgcggactttgatcatctagaagcttggcacaactattatccaagacctgaaaccgctttagacaaggattggtatcacgagaaaaaccaatggttgaaggcttatggatttacgattcaagggtttgttccaggtgatgaaaagctgcgcggtccactgtaccgaggactcccaactctggaagagcatcgcggaatgcatcctttagcagcagctttagatttatcaaacgaaactgataaagtttatatcggtgacagcgggttatcaaaagaggtcttaagacaattttctttctatataaaagaagaagcgctaaaactaagagtggaagcatttgataagcaaattgagtatgttttaggtacacacatcaatcgtcaagatgaagctcgagatgtcattcgcagtgctgaagctcgattcaaaaaaatcccgaatgtcgagccgctatcggttaggaaacgggatgttggtgctgtaacgattgataatgctaagtatttgcgctacatgggggaaattcaaattgtgaagcgagcactgcctgccgatgagaaagtaaacgttgtaggacaggtgatcgctgaggatcaggctttaatcaatcatattaaagcaggacagaaattttatatagagagtgtggaaaagaatgattaatttagaaaacttaacaacagaacgacgtaatgaaacaacttttggtttagatgaaatgagtgtggcagaagccgtgcaattgatgaatcaggaagatcataatgtaccagatgcagtagcagaacaattaccacaaattgaaaaagtaattgaagcaacaatcaccgccttcaaaaaggatggccgtttgatttacatgggcgcaggaaccagcggacgtttaggcgttttggatgcggcagaatgtgtaccaactttcggtgttgaggcagaaatggtcgttggcttgatcgcaggtggggaacaggctatgacagtagctgttgaaggagcagaagacgacgcagacttaggtgcacaggatttaaaagatttgcatttgactgaaaatgacatggttatcggaatcgctgccagcggccggacaccttatgtcatcggcggattagattatgctcgttcaatcggagctgccactggaacaatttcctgtaataaaggtgctgagatcagtaaacatgcggatctgccaattgaggtcgattgcggaccagagttcttaacaggctctactcgtttgaaatcaggaacagcacaaaaattaatcttgaacatgatttcaactattagcatgattggaattggtaaggtctataacaacttaatggtagacgtgaagccaactaatgaaaaattagtcgaacgttcaaaacggattatcatgcaagcaacggaggctgactatgaaacggcagcacattattttgcagaagccgaacaaaatgtaaaattagcgatcgtgatgattttgacagatagttctaaagaagaagccgctgagaaactaatccgagctgacggatttgttaaaaagacaatttaggagggaagaacaatggcgaaagatgaattaaccttgaaccaaattgctaaaaaaatatatgctggtgcaggcggaatggagaatgtccaaagtgtcgttcattgcatgactcgcgtgcggatgagcgttcgtgatgatagtaaggtcgatcaggctaaattgaagaatattccaggtgtcttaggtgtggttgatgatgagcagttacaagtcatcatcggtccaggaaaagtcaataaggtcgcaaaagaaatggtcgatatggccggtgtcggacttggtgaggaaatccctcaaggctctggtaaagataaagtcaatgcaaaggcagcagaaatgaaggcggcacaaaaagccaagcaaaagaactctcccttcaaagcagttttaaaagatatttctaacattttcgttccgatgattccagcgtttgtggggtcaggtttagttgcagggattgcagcgattttgacgaacttagtaactgccggaactattgatgcagcgaattggcagcaaattattgatgtcatgaacatactgaaaaacggaatgtttacttatctagttattttcacaggtgtaaattctgcacaagtcttcggtgcgaacccaacactgggtggagttatcggagctgtcgtattgttaacagggatgaatcctgaagcgccgatcaagaacttgtttacaggtgatgctttagccgctggacaaggtggaattatcggtgtaatctttgccgtttggttgttatcgattgttgagaagcaattgcacaaaattattcctgatgcggtggatattatcataacgccaatgctttccttactcgtgatcggtctattagaaattttcttgatcatgcctttagcaggattcatttctaatggtatggtaggcggaatcaactgggtgctatcagtcggtggagcattttctggttttgtcttaggtgcattgttcttgccaatggttatgtttggcttgcatcagattcttacgccgatccatattcaaatgatcggtgaaactggtaaaacattattgttaccgatcttagctatggctggggcaggacaagtcggtgcagcttttgctctttggatgaaactacgcaaggataaagaattaactgaaatgatcaagggtgctttacctgtggggattttaggtattggagaaccattaatttacggggtaacgttgccgctaggtcgtcccttcatcactgcttgtatcggtggaggtatcggaggcggtgtgctaggggctcttggaggtatcggtgcaattgcaatcggaccttcgggtgtcgcgttgatcccattgatcgcgaatggtcgctggtgggggtatgttctaggtttgttagcggcttatgctggtggtttcgtagcaacttatttcttcggtattcctaaagataagctggctgagcaaaagctagcagaaacaacagttgttgaagcaaatgaattagctgacagacctgtagctgctcatacaacaaacatttttacagcagtagcacaaggttcggtacatccattagaagaagcggcagatcctgtttttgctcaaaaaatgatgggagaaggctattttgttgagccaacggatggtgcgatcttctcgcctgttgccggaaaagtttcaacaatttccccgacaaaacacgcgatcggtatcacgacagacagcggattagaggtcttgctacacatgggcatcaatacggttgaattagatggaaaaccatttgaagtgttgacaaaagagggacaaacagtcacgcctgaaacacagatcgcttctgttgatttggctgaaatcaaacaagctggaaaaggtacatcaatgatggtattgattacaaacatgaatgatgttgcaacccatgtcttagaaaaaactggtgctgtccatgcctcagaagaagtttttaaagcaactacaatatagtcataaaaaagcgatgctgtttcggcatcgcttttttgtagaaaactgacaccggttgtcgcattagttatgctacacttttctcaaagacgaagaaggggtgtttcgcctatgaaggaactagggattaactatcaattttcagcaaaggtctgtcatcattcttcttcaccagagatgcctggctggatgctagttatactcccaaaggaactttcctttgagattagaaagctgttcaaggagttagaggagggctggggacgcatgaaagtgatagctcaaatcggaaaaagtgaatggcgaacggccatctggtttgataccaaacaaggaacttatttacttccaatcaaggcagagatcaggaaaaaagaacagatcgtaaaagatcaggtcgtaaatattgtgattatgataaatatctaaacaaaagcgaggaagaatacgatttcttcctcttttttttatccttaagtagtcacaagaattttaaacaacatacttttaggatattatgaattttttcacaattagtgatactcattcggtgttttttgtgctattctctagaataagaattttaaagaaaagtgaataactagttaagagaaagtgagaaaaatagcttcgctaggattcatcttaacttgaagcaatgttcggtgagattgtagtaaaacaaggagtatttatacgatggagatagttttggataaaaaagaaatattgcgttatctcggttatcgaagcaagcaagaattaaccactgaaatggatgttcaaattctacaattaatggaggaaatcaaacatgttgctgttcctcgctatacgtttctaatttttccttgtcgtagcaatgaaacagaaaaaagcattcaagtagtgggaacggacttgattttagaaggtaaagccatatacaatcatctgaagaatgctaataaggtggctttattggcggcaactttaggaattgaagtagaacggcaaattcgtaaatatgaattgacagatatgagcaagtccttaattttagatgcttgttgtgtggaatacattgaaaaaatttgtgatttagcagagtgcgaaattgaaaaagaagtgattaatgagcacttaattttaaatcgtcggtttagtcccggctatggagatctaccaatcgagacacaagcgaaatttttagcagttacagatgcgacaaaacgtgtaggcatcaatttgagcgacagttttttgatgattcctcgcaaatcagttactgcaatcatcggtttgtttactgatgaaaaattagctcgtccgcgacgaaaaaaactcgcttgcggcgattgtttaatgaataaaaattgtgaatatcgaaggtgaaaaaatgacaattatcgaagatttgactgaaaacagattgctttttgatggtgcgatgggaaccatgctgcaaaaaatgggtctgccagtgggaatggagcctgaatatttcaatttgagccatcctgaaacgattacgcagattcaccaagaatacgtggcagccggagcggatgttattaccgccaatacatttcaagcgaatcaagtaaaattgaaacaaacagagttgccagagatcatcgaagcggcgatcaacctagcaagagcggctcaaccgaaatacgttgcttatgatatgggccccataggccaattgatggcacccatgggaaccttaagttttgaccaagcgtatgaaatgtttcgagaacaggctgtgttggcagaaaaggccggagcagatctagtagtaattgagacaatgtcggatttattggagacaaaggcggcaattttagcaatcaaagaaaatacctcattgccgattttttgcacgatgacatttcaggaagatggtcgaacttttgtcggtacagaccccataacagcggttttgaccttgcagtcattagggattgaggcggttggagtaaactgttctttaggtccaaatgaactattgccaatcgtggatgaaatcttaacttatgccaacataccagtgatggttcaagcaaatgctggcttgccagaaatgaaagatggtcaaaccttttatccgttgacggtggacgattatggtttagctgttgagaaaatgctgaaaagcggtgttcgcatcgtaggcggttgttgcggaacaaatccggagtttattcagaaaattcgccaactgattgatgacatccctccagttgctttgactccgcaaaaagttacggccgttacctctgggagtcaaacgattgttttaaatgaaggattgcatttaattggcgaacgaatcaatcctactgggaaaaaacgtctgaaagaagcgctgaggaaaaaagatataagctatattttgaaggaaggcttgaagcaaattgaggctggagcggatattttggatgtcaatgtcggtttgccggaaattgatgaagctgagatgatgcaaaaagttgttcaagagctgcaaggaattgtcacagctcctttacaaattgacagctccagtatcacagcgattgaggccggagctcgttactataatggtagaccattgatcaattcagtaaacggaaaagaagaaagtatgcgggaaatattcccgattgctaaaaaatatggagcagtggttttagggttagcgttagacgaaacggggattcctgatacggctgaaaaacggttggcagtagctgaaaaaattgttgaaactgctgctagttatgggattgccaaagaagatgtcatgattgatccgttagtgctaacggcatccgctcaacaagaacaggtacaggtgaccctagatacgatcaagctggttcgagaaaaattgggtgtattgactgttgctgggttaagcaatgtttcttttggtctgccgaatcgggaaagtctgaatggggtgtttttggcggcagccgtgggggctggacttaatgcgccgattgttaatcccctctcagatattctgatgcaagtggtgcaggcattaaaagtcattaataaccaagatcaggatgcgatggagtatattgctaataaccaacaagtaatagatcagacagcttctctggttacgagcgatcaaaaaaatactgatgacttgaaaacgttgattctaaaagggcaaaaggatgaaacgccaactttaacaaaacgcttattagaaacgaaaacccctctggaaatcgttaatgattattttattcctgcgttagatgaggtaggttcaaaatttgaaaaaggtctcctgtttttgcctcaactgatgcaatcagctgaagcggttcagcggtcacaagaagtattaaagcggtattttgaggctaacggacaggaaacagaatataaaggaagaattctgttagcgactgtacagggggatattcatgatattggtaaaaatattgtgaagatggtgttggaaaattatggctttgaggtaattgatttaggaaaagatgtaccaatttctatggtggttgagacactcaaaaaagaaaagattcagttggctggcttaagtgctttgatgacaacgacggtccaaaacatgaagagcacgattcaagccgctagagaagcaggtttagatacaaaattcatggtgggcggagcggtgctaaatgaagaataccgagaatttgttggtgcagattattacgccaaagatgctttaaatagtgtcacgattgcgcaagaattcttccaagacaaaaaataaaacagccgagtaaaatggatgatttctagacattttactcggcttttctattttataatgacttcctgcggctaaaaatatttttttcgatattcttggacgaccgctcgtgtcgaataaattttttcagcattttctttgttgcggctgatatagacatagaacaataaatcgatcgtaatgaactgagctaagatcgaatctgttgcggcgctacggtaagttgcttcggtcggacgtgaagtttgaagacaaacgtttgaaagcttggccaatggattttgtccgaactgggtcagggtaatgattgggatacctaagtctttggctgtttccgctaaagcgatcagttcggaggtcaatccagaatttgagactagccaaatgaccgcttctttttgatgcaggactagctgcggcaaaatggtgttgtaatcttgttcgctaataacattcttccctaaacggctccatttttgaacaatgtcagttgctgctaaactagaggcgccaattcctaaaacataacaaaattctttttcttccaatagtttgcaggcctcgagaaaaacctcttcgttgaacagagctgttgtctcgtcaatggtgaagcgagcgttgctggctaatttgttttttaaactgtgaaatgattcgtcgtgaccgacatcactgtaggtattattgctgcgctcctgcattgtttcggcagaaagctctattttaaaatctgttaggctattgtagcccatcttttttgaaaaacgaacaaccgttggtgcgcttgctccagaggcttccgcaatttcgttggcggtcatacctgaagctttttcactattgtcgcgaatgaattgatagatttttttttcagctgcagacatttccttctgcatgcttttcatatgagaaagaacgctcataatggactccttttaaactttttttctattataccattttccaaataaatttattttttctatagaacgacagatccgtctttcttttttcttgaaaagtcgtatgataataaatgaatcttttctaaaggagtttactagatggctttgattgattttattttgcatatcgattcccacatggtgtcgttggttcagcaatatggtgttggaatttatccaattttatttgcaattgtctttattgaaacaggtgtcgtgatctttccattcttgcctggggattcatttttatttgcagcaggcgccttaactgcgttaggtggaaatgtgctgcatctgccatatgtgattgcgatttgtgtgattgctgcgattttgggagacacaatgaattattggattggccatacgattggcgtcagagctttgtatcatagcccgatttcccgcttcatcaaagaggataaagtaaaagaggcggagaacttctttaacgaacgtggaaaatggacgatcttcttgggccgttttatgccatttgtccgcacgtttatcccgttcattgccggttcaagtaaaatgaattgggccattttttcaagctttaatgtttttggagctatcgtctgggggacagtggtcactctggcaggttatttcttagggaatattccaattgtcagtgagcatttttcattgatcatgctaatgattgtttttatttcattggtgccaattatgattccgtatatcaaacaaaaaatccgtgcataaaaaagagtttgaaggttctccgatacaggaggcgttcaaactcttttttctacaaatggaaatataaaatttcgggtattactctgaagcgtaggggagggcctgttgttcctaaacctgtattaacaaccaagcttgtttgggacgtcaaagcataaatgccttgatcatagagctttgacccaaaatttttatacggcaagatcggaaaacgaatttgtccaccatggctgtgtcccgataagatcaaatcaaaacaatcaaggtctggcaaatgctggacttgatcaggctcatgtaccataaggattgaaaaacgcgcatctttgggttgcgtattgtagtcaggttgcccttcctgaccatcatcaatgccagtcaaacttatttgctctaccagcgtactttggttgtttaacaaaacgaagccgccagcagccagtatttcactgacagcatcttgtccgttggaacgataatcatgattgcctaaaatcgcaaatttccctttaggggcgttgattttagttaattgttgactgattatttcacaatctcgtgtttcccaatagcgataattttcaattaagtcgccagtgaataatacgatatctggctttgcggcgttaagtttttcgacgattttgtcaaaacgttttggagaataaaaaggggagaagtgactgtcgctgatttgcgcaatcatcaatcctgtcttttttccttccttgatatctagtgttgtgtgctttgtgatcttaaaatgcttttcgaccaattgataggtggaatatcggcaatagatcagaaagagtactgcgagcacaattaggaaaagaatcatctataccactttctttctgatttttcgtcagtatatccaaaagaaagacctgtcacaagtttgacaggtcttatttaatgattatttaaatcgtacggactgtttcacgttgaattaaatgatgtggtacgactaattggacacccgtagattgcttttggtcaatttgttccatcagtttttgtgtccctaatcgaccgagatctgaaatatcgatatcaattgtcgtcaagtaaggatgaactaatgttgcaaaaatcgaattattgaagctgataactgacaggtcatcaggcactttatagccatgcaaggttgccagttggatcatccgcagcgcaaaaatatcatcgatcacgaccaacgctgttgcaccagtttcttcaattacttcagggaacctcgtataatcttcaggctgcaacatcgttagcggtggatgcgtgggcaaactttgcagcatcatcgcttcttggtagccaaagtagcgttcgaagaaaatcacttcttgattgacgttcgaaacgaataaaatatttttgtggcctttttcgatcaagtgctctgttgcttgcttgccaagtaactgattgtcattatcgacatacagaatatctgcttctctttttgggggacgcccaatcaaagtaaatggtattttattctgatagagatattcagcaattggatcgtccttttctgaataggctaaaatgaagccgtcaacttgtttttgtcgatgcatccgggtgacgttttctagcagtgtttcactattatccgatgaagctacagcggtcgttacttggaaatcagccgctgtttcattaacggcattcagtaattctaaataaaacgggttacccaagcgttcacgggaattaagcggaggcaaaatcacgcctaaagagtttgcccgctgttttccaagatttcgcgctgttacatttggaaaatagcccatttcatccataatcttacgaactcgttgcttcgtctcagctgaaatactagggtgatcattaatgacgcgtgaaaccgtagaaggagagacattcgctttttttgccacgtcttttactgtagatgtcatatttcgctctcctttctcattaattattttcaaaccatataccattcagccgtataatgaatagttttatttttgcgaataccaagtaaattggtaaaagcagaggggatacaatctcattactagtgagtacttatttatcccattgtttttccagaaatgctagtgttaattcggaagttgattctaccaaggcaatatcatcacctaattgttctgcttgtccgacaccaacgggaagggctccgcaggctttgatggcagctataccagcctgagcatcctcaattccaatacattcatttggatctaagcctaccacttgtgctgctaaaataaaaatatccggggcaggttttccagccgcgacttttgccggatcggcaattccgtcaaaatagtcggtcaatgccatttgttttagtagaaaaggaccgtttttactagccgatgccaaagaaatcttgattccggcattctttaattcttttaacagctctaaaattccgggataaacgtctttaggtgaaacagcttgaatcatttcaacgtaattgtcgtttttactctttgccaattgctggaattctgtttcagaaaaatcactttcacgtttaccatgctcaaggatcaaccgtaaagaatcttcacggctgacacctttgagtttctcgttgaattcacggtcaatcgtaatgcctagctcatcagccaattttttccatgcaaggtaatgatactcagcggtatccgtaatcacgccatctaaatcaaatagtacacctttaaacatttgattcctcctgttctaacggaaccgtgattgtatcgctcaagataatttctttctcataaagcatcatagctaaggcagctccatctttcaagtcaatttgtacttctttttgatttacactgacagctaacagacggccacggtaattgatatggaatgaataatgatcccattcctttggtaataaaggtgcaaagcttaatgtcccagtattggttttcatctgcgcgaagccttggactatagctaaccagctgccagtcatggaagtgatgtgcaaaccgtcgtctgtatcgttgttgtaattatctaggtctaagcgagccgttctttgatacatttccattgatttatctgttaatccaagttccgcagccaagatcgcgtgaatcgaaggcgatagtgaagactcatggacagtcattggttcataaaactcgaagttttttcgtttttcttcaagtgtaaattgatcgccaaagaaatagattccttgtaaaacatccgcttgcttaatgaagcaagaacgtaaaatcttatcccaagaccaattttggttcaacggtcgatcttctggagacaagtcagaaacaggcattaaatctttgtctaagaaggtatcatgctgtacgaaaatacctaattcttcatctgttgggaagtacatatgatcgatgatatcttgccacttggcttgttcttcagcagagatcgatacggtcgtttgtgcttgatatttttgataattttccagtgtataggatagtacccaacttgctaaataattagtgtaccaattgttgttaatattattttcgtattcattaggacctgtcacaccatgaatcatgtatttttgctgacgtttcgaataatgtactcgatccgcccagaaacgagcaatctctgttaatacttcaagaccttctttttgaatatagctttcgtcacctgtataagttgtgtagttataaattgcgtgagcgatagccccatttcgatggatttcttcaaaggtgatttcccattcattgtgacattcaaccccagtaaaggtaaccattggatataaagcaccattcagaccttgctgacgagcattgtgctgtgcctgcggcaattgattgtgacgatattttaacaaatttttcgttacatttggatcagaaatacccagatacattggaactgcgtaagcctcggtatcccaataggttgcaccaccatatttttcaccagtgaagccctttggtccaatatttaatcgttcatcttcaccgtagtaggtagagaatagttggaaaatattgaaacgaattccttgctgtgcctcgtcatctccaccgatcaatacatccgccaatgcccaccgatttgcccaagcctcattttgctctgccaataagtcttcataagtagtagcgtagtctgttaataatgctatggctttttcgctttgttctgtttctggtacatcacggcttgttaagaccacaactcgcttttcaagttgaatagtttgatttgctttcaaagcataggtgaaggtttcagcaacttctagcgtatcatcctgttgaagtccgattgaagaactaatatgttgcatagcgccagttacagagaattgttcgatgccaaaattatttggtaccgtctgcgttgtcagaaagctgatatcttcttggtgtccgcgtcctttttccaaccaaaacatttcttcatagttactgtcttcgttttgaacattattgtctagtttagacacgacctttagctctgcttcgccaattaaacactctacagtaagccgaatcaccgcaagttcttttttgacgacacttaaaaagcgctcgaaagtaaaacgaatttttgcatgatcaattgttacaatgaaggtacgagtaagaacaccattttgcatgttcaactccaaatcgaaatcttcgatgtccatcactgctaaatcaatctctcgatcatttacgaataacttcatttgaatgaaatccaacgcgttgattactttgccgaaatattcaggatagccgttcttccaccagccaacacgggttttatcgggataccagataccagcaagataggtgccttgatgatggtcaccactatatgtttcttcaaaatttcctcgcattcccatgtatccgtttcctatactagttaatgattcttgtaggcgacggttttctttatctaactgagttgttctaatcctccaagggtcaatttcaaagagacgctgaacttttttcataataagtcctccttatgttttcttactctcataataaacgcaaccggttgcgcgagtcaagcattagttcactgaattggaaagataagtcctttcataattttggtaattttaaaaacatttcagctgaaagagtttacaaattttgtttatgagtatataatgcaaattaacgaaaccgattgcacaaaatgagtaatcgaaaaaaataggaggaacaaatatgaaagggatcaaaaagctctttagttttgaattttggcaaaaattcgggaaggcactgatggtggtaatcgcggtaatgccagcggcgggattaatgatcagtatcggaaaatcgctaccgttaatcaatgagaatctcggatggttagttacaactggtggcgtagtcgaaaatattggttgggccatcattggaaatctacatttattatttgcattagcaattggcggaagctgggcgaaggagcgagctggcggtgcgtttgcagcggggctatcattcattctaattaatcgaataactggctcgatctttggcatcacttctgagatgttagccgatccaaatgcaatgactcacaccttatttggacaaaaaataatggttgatggctattttacaagtgttttagaagcaccagcattgaatatgggtgtttttgtcggaatcatcgccggttttgttggagcaactgcctacaataagtactacaatttcagaaaattacctgaagtgttgactttcttcaatgggaaacgttttgttccgtttgttgttatcttgcgttcagtgattgttgctttggttttagcctttctatggccgattatccaaacggggatcaacgagtttggtaaatggatcgcaaactctcaagaaactgcaccgatcctggcaccatttctatatggaacgctggaacgattactcttgccgttcgggttgcatcatatgttgacaattccgatgaattatacgcaattgggtggtacttacgagatactgactggcgcacaagctggaagtcaagtattagggcaagatccattatggttagcttgggcaacagatttagttaatttgaaaaatggtggagacatgtctcaatatcagcaagtattgactcaatggactccagcacgattcaaagttggacagatgatcggttcttcaggtatcttgatgggcttaaccttagcaatgtatcgaaatgtcgatcctgataaaaagaaaaaatataaatcaatgttcttatcagcggcagtagcagttttcctaactggagtaacagagccattggagttcatgtttatgtttgtggcggttcctttatatgcatgctacgcagtgattcaaggggcagcttttgcaatggcagatttaatcaatctacgtgttcactcatttgggaatatcgaattattaacccgtgtaccgatggcattgcgagcaggacttggtaatgatttacttaactttgtattaacaagtattgcatttggagtatttacttacttctttgcgaacttcatgattaaaaaattcaactttgcgacaccaggaagaaatggaaactacgaagttgataatgaagaagcaactaatactacaagcgatggatcagtatcagcggactcgcaaattgtgaaaatcatcaatttgctaggaggcccacaaaatattaccgatgtggatgcttgtatgacacgcttacgggtgacagtagcggataagaacagcgttggcagtgaagaggcttggaaaaaagcaggagcaatgggacttttggtcaaagacaacggtgttcaagctgtttatgggcctaaagcagatatattgaaatcagatattcaggatttgttggattcaggtgttgaaattcctaaaagtgctagtcaggaagagtcgactgtacaggaaaagaacgccagcacatcgtttaaaggattgcatgcggagttcgtagctccagcaaatggtgagatgattccgatcgataaagtagaagatgacgttttttctcaaaaaatgatgggtgagggatttgccgttgtaccggaaaacggtgaaattgctagtccagtttcaggaacaattgtgtctgtattcccaacaaaacacgctattggcatcaagactgatgatgacatcgaagtattacttcatatgggaattgatacggtagatttaggcggtgaagcatttgaaatcaaagtacgagaaggggaaaaagtcaaagcggggaaagttgtagcaacagctgatttagcgaaaattcaaaaagccggcaaaatgactacgatgatcgttgtatttacaaatggtgacaaaattaaggattaccattatgctaagactggactcgtttctcgtggggaaacgattggaacaatcgactattaaagtgaggcgagagcaatcaaagtattgaccttgaatactcatagctggatggaaggaaacgaccaacagcaaattgaggtgctagcgaaccgtattgcaaaagagaattatgatctgatcggcctgcaagaagtaaatcagcttcttgtaagtccgttagcaaacgtagaccaatactttcaaccaacgaaagaacaggaagccattcatcaagataattttatatttctattgactgagcggttgaaggaattaggatgcagctattattggaactggacgtataatcacgttggctatgacatttatcatgaaggcatcggtttattgtcaaagacaccactaaacgtggaaagcttgttgatttcagaaagtcatgatccgagtgattatcatacgagaaaagtggtaataggtgaaacaataattaatgatcaaaagataatagtagtaagcagccatttttcttggtggcaaacgacaaaaaaagcttttgcttatgaatggcgaaagttggagcagtttttagtagaaaaacaaggaaagcagatcattatgggcgatttcaataatgacgcgaaaacaagcggtgagggttatgatttggtcgataaaagtattcttgatttacaggatgcttttattcatgccaaagtaaagctcggtgaaaacacggttgaagaatcaattgatggttgggcaggaaatacggcaaaattgagaatcgactatatttttgcctctcgtaactttgaaatagaaagttatcaagtggtttttgatggggaaaatgaggttgtaattagtgatcattatggtgtagaagcaacaatgggctagcgaattgctagtccattttctatttatttgaaattattttgaaaaacgactgaaaagtatttgacattatttttcaatatgatattatcaatagcgttgctgaaacatgttgatacgacaatgaaaaataattgttgacaagctttttgttgaatgttattatttcaaagttgtcaattggatttcaaaactttttcaaaattaattgaaaaaagttgttgactttcaaacggcaacctgttaagatataaaagttgctgaaacaaagcgacaaacaatgtagacctttgaaaattgaacgaataaaacaaaccaaatgtgtagggcgcttctattaatagaagcaaacaacatagcaagcaatatgctagcaagtcaattattacaattgagcttaacagtcggaagactgtttcaaacactttttatgagagtttgatcctggctcaggacgaacgctggcggcgtgcctaatacatgcaagtcgaacgctttttctttcaccggagcttgctccaccgaaagaaaaggagtggcgaacgggtgagtaacacgtgggtaacctgcccatcagaaggggataacacttggaaacaggtgctaataccgtataacaatcgaaaccgcatggtttcggtttgaaaggcgcttttgcgtcactgatggatggacccgcggtgcattagctagttggtgaggtaacggctcaccaaggcaacgatgcatagccgacctgagagggtgatcggccacattgggactgagacacggcccaaactcctacgggaggcagcagtagggaatcttcggcaatggacgcaagtctgaccgagcaacgccgcgtgagtgaagaaggttttcggatcgtaaaactctgttgttagagaagaacaaggatgagagtagaatgttcatcccttgacggtatctaaccagaaagccacggctaactacgtgccagcagccgcggtaatacgtaggtggcaagcgttgtccggatttattgggcgtaaagcgagcgcaggcggtttcttaagtctgatgtgaaagcccccggctcaaccggggagggtcattggaaactgggaaacttgagtgcagaagaggagagtggaattccatgtgtagcggtgaaatgcgtagatatatggaggaacaccagtggcgaaggcggctctctggtctgtaactgacgctgaggctcgaaagcgtggggagcaaacaggattagataccctggtagtccacgccgtaaacgatgagtgctaagtgttggagggtttccgcccttcagtgctgcagctaacgcattaagcactccgcctggggagtacgaccgcaaggttgaaactcaaaggaattgacgggggcccgcacaagcggtggagcatgtggtttaattcgaagcaacgcgaagaaccttaccaggtcttgacatcctttgaccactctagagatagagcttccccttcgggggcaaagtgacaggtggtgcatggttgtcgtcagctcgtgtcgtgagatgttgggttaagtcccgcaacgagcgcaacccttattgttagttgccatcatttagttgggcactctagcgagactgccggtgacaaaccggaggaaggtggggatgacgtcaaatcatcatgccccttatgacctgggctacacacgtgctacaatgggaagtacaacgagtcgcgaagtcgcgaggctaagctaatctcttaaagcttctctcagttcggattgtaggctgcaactcgcctacatgaagccggaatcgctagtaatcgcggatcagcacgccgcggtgaatacgttcccgggccttgtacacaccgcccgtcacaccacgagagtttgtaacacccgaagtcggtgaggtaaccttttggagccagccgcctaaggtgggatagatgattggggtgaagtcgtaacaaggtagccgtatcggaaggtgcggctggatcacctcctttctaaggaaatagttcatcgaagatgaacgttacggaaactacacaggaatgctttattcgttcagttttgagaggtctactctcaaatcgttcattgaaaactggatacagaaacaattttaaacaaaccgagaacaccgcgttgaatgagttttttaataagttcaattgcttatttattactaaggaacatgatcgctcatgggaattagtaagacccttgacgaaagtcaagataaggttaagtgaataagggcgcacggtggatgccttggcactaggagccgatgaaggacgggactaacaccgatatgcttcggggagctgtaagtaagctttgatccggagatttccgaatggggaaacccaacatcttttataggatgttacttttcagtgaatacatagctgattagaggtagacgcagagaactgaaacatctaagtacctgcaggaagagaaagaaaaatcgattccctgagtagcggcgagcgaaacgggaaaagcccaaaccaagaggcttgcctcttggggttgtaggactccgatatggtagtccagtgagatagtcgaaggacctggaaaggtctgctagaaagggtaaaagccccgtagacaaaatttgactggcacctaggaggatcctgagtacggcggaacacgaggaattccgtcggaatccgggaggaccatctcccaaggctaaatactccctagtgaccgatagtgaaccagtaccgtgagggaaaggtgaaaagcaccccggaaggggagtgaaatagatcctgaaaccgtgtgcctacaacaagttagagcccgttaatgggtgatagcgtgccttttgtagaatgaaccggcgagttacgattacttgcgaggttaagttgaaaagacggagccgcagcgaaagcgagtctgaatagggcgaatgagtaagtggtcgtagacccgaaaccatgtgatctacccatgtccaggttgaaggtgcggtaaaacgcactggaggaccgaacccacgtacgttgaaaagtgcggggatgaggtgtgggtagcggagaaattccaaacgaacttggagatagctggttctctccgaaatagctttagggctagcctcagagtaagaatgatggaggtagagcactgtttggactaggggcccatctcgggttaccgaattcagataaactccgaatgccatccattcatctctgggagtcagactgtgagtgataagatccatagtcgaaagggaaacagcccagaccaccagctaaggtccccaaataactattaagtggaaaaggatgtggggttgcacagacaactaggatgttggcttagaagcagccaccatttaaagagtgcgtaatagctcactagtcgagtgaccctgcgccgaaaatgtaccggggctaaatagtttaccgaagctgtggaacacaccaatggtgtgttggtaggagagcgttctaagggcgttgaaggtagatcgtgaggactgctggagcgcttagaagtgagaatgccggtatgagtagcgaaagacaggtgagaatcctgtccaccgaatgactaaggtttcctggggaaggctcgtccgcccagggttagtcgggacctaagccgaggccgaaaggcgtaggcgatggataacaggttgatattcctgtacccgttgtttttgtttgagcaatggagggacgcaggaggctaaggaatcagacgattggaaatgtctgtccaagcaatgagtcttgatgtgagtcaaatgcttacatctctaaggacaagttgtgatggggagggaaataatagtaccgaagttcctgatgtcacactgccgagaaaagcttctagtgagaaaacaatggcccgtaccgcaaaccgacacaggtagtcgaggagagaatcctaaggtgagcgagagaactctcgttaaggaactcggcaaaatgaccccgtaacttcgggagaaggggtgctgatctaacgatcagccgcagtgaataggcccaagcgactgtttatcaaaaacacaggtctctgcaaaatcgaaagatgacgtataggggctgacgcctgcccggtgctggaaggttaagaggagtgcttagcgtaagcgaaggtacgaattgaagccccagtaaacggcggccgtaactataacggtcctaaggtagcgaaattccttgtcgggtaagttccgacccgcacgaaaggcgtaacgatttgggcactgtctcaacgagagactcggtgaaattttagtacctgtgaagatgcaggttacccgcgacaggacggaaagaccccatggagctttactgcagtttgatattgagtgtttgtaccacatgtacaggataggtaggagccgtagaagtcgggacgctagtttcgacagaggcgctggtgggatactacccttgtgttatgaccactctaacccgcaccactaatcgtggtgggagacagtgtcagatgggcagtttgactggggcggtcgcctcctaaagagtaacggaggcgcccaaaggttccctcagaatggttggaaatcattcgcagagtgtaaaggcacaagggagcttgactgcgagacctacaagtcgagcagggacgaaagtcgggcttagtgatccggtggttccgcatggaagggccatcgctcaacggataaaagctaccctggggataacaggcttatctcccccaagagtccacatcgacggggaggtttggcacctcgatgtcggctcgtcgcatcctggggctgtagtcggtcccaagggttgggctgttcgcccattaaagcggcacgcgagctgggttcagaacgtcgtgagacagttcggtccctatccgtcgcgggcgttggaaatttgagaggatctgtccttagtacgagaggaccgggatggacttaccgctggtgtaccagttgtctcgccagaggcatcgctgggtagctatgtagggaagggataaacgctgaaagcatctaagtgtgaagcccacctcaagatgagatttcccatttctttaagaaagtaagatccctgagagaagatcaggtagataggtcaggagtggaagtgcagtgatgtacggagcggactgatactaatcgatcgaggacttaaccaaaaattgattcacggttgttagaatgtttctgatccagttttgagtgaacgacgtttactcaattaaatactagtgtggtggcgatagcgagaaggatacacctgttcccatgtcgaacacagaagttaagcttcttagcgccgattgtagtgaggggttgccccttgtgagattaggacgtcgccacgcagttaggactattcttattaggatagtcttttttttaacagtagagaaagtataaaaagttaagggctaaaaggctgcactaccagtctttttagccctttttattttgctatttttcttagatacagaagtttaaagtcatgttttccaaacaacttctttcctaaattacctctcttaatctattattacgattccttatttcttcatctgtttagctatttcctctttaagtctcattcagttgcaaagtatcatatcattctaaaatatcgttgagagtgtttaaggtgctagaaacccaattgtcaaatgagttcaagtcttttttcatgtagaataaaatgataaacataggatattttcctctattttataagaaatcttggatggaaaaatagcaatctggttggtaaaagaaatgggtacttttgaatctactgtatatttgggtttatttttgcaaaggaagatagaactgattaaaaaagtgggtcgtttctatacgtaagtactaagatattacaaaacattgtagtaactttttttattattcaccttcaattattgtataacagtatattatttttagctgaaaaatgttcatgttatactaaaattatgaataatattggaggaatgtgatgagtaagcgaggatttaaaggtggaattgatttgcatcaagatccggccttgcatttaagaggaatcgataattataaaaaggttgagaacatacaacctaaaaaagtttatattcccgttcagcaacatattggtgagcctgcagaggttatcgtctctgtaggagaaaaagtatttttaggacagacaattgcaaaaatagatgaaggattaggcgcgaacgttcatgcaagtatttccgggaagatcatcggaatacaagagattgatcaaggtcagggggataagatgacctgcgtaattattgaaaatgattttagagatgaacctcaagagatacaccatgaaacaattgatgatttgacaccggaaatgatcgttgagcgtgttgaatcagcgggagtggttgggctaggcggggcgacttttcccagtcatgtaaagctaaaccctaaagaagatattcatacttgtatttttaatggtgctgaatgtgagccattattgatgtctgatgctgcattaatggcgactcagggggaaaagctgattaagggctgtgagttggtattgaaagctgtcgcagcaaaggaaggcattattgcaattgaggatgataagcaagaagcaattgaggttatgcagattttatgccatgacatatcgaatctttccgttatcgaagttccttcgatttatcctcaaggaagcactgagatgctttttacagtaattacaggaaaggaagccccagcagatggttcaacacgagacttaggctatttgattatcaacgtggctacgacggtcgctgtctatgaagcgattgatcccggagttcccctgagtcatagaatttgttctgtggtgggtgatgtcaagcagcagaaaaatgtctattttccgctgggaacttcgattgaggatatgattgctttttgcggaggctttgagggaaagccatctaagattatcacaggtggatttatgatggggaaaacagtagacacaatggcggcttcattaacaaaatcagccaatgggttaattgttatcaatgagcatcatgatgaagacagcacaccttctccttgtatcctgtgctctcgctgtgtcgctgtttgtccggtggatcttttgccacatcagcttgaaaaaaattacttgaaggaaaattggaaacgtttggaaaagctttatgtagatagttgtattaactgtgggtgttgtacgtatatttgcccagcacgtcggcatttagctgaacatattgttgctggacaaaaagctcttaaagaaaggcaggcataggatggggaataaaaattcgttggagcagcttcgcagtacacgttacccattaatggaagcctcgccgcatttgttgttttacgaaaaaactgatcgaataatgcgaatggttttattggcgctgctacctagcgtgattgcttcaattattttctttggcctgcgttcattgcttatttatgtgatagccataggtacatgcctgatttctgagtttctatggtttaaatttcgcaaagataccttgcctaaagattattcagcagtagtgactggtgttctattggcaatgagcttgccagcaagtgtaccgttgtggtatccggctttaggcggagctatcggaattattatcgcaaaagaattgtttggaggaatcggtagaaatctgttaaatccggctttaacagggcgagctgtcttaagattggtctttgcaaaggaaatgtcagcgaatgtacaaccgcagccttttttctcgctgaatggcttagatgtcgtctcttctgccacgcctttgatgaatgccaaagctgatgaaagtttaagctctggtcagatgatagacagcttgactggattgattgctggtaaaaatgctgaaacaacggcgatacttctctttttaggagggatgtttctgctgtataaaaaagtaattacttggcacattccgatttgtatgcttagtacaatagttattattgcgctttttttggggaaaggtgatctgacgattgtttttgctcatatctttgggggtgcaacaatgctgggtgcttttttcatggcgacagattatagtacatcacctacaacacccaaaggcgaaatcaaatatggaatttgttgtggtgtgctgctaatggcttggcgttcatttagttctatggcagaaggtatgacatttattttattaattatgaattgttttgtaccattgattgatcacctcattattccacgagcctacggtgtgaaaaactagcagtcattttcagtaaatatatagacgttctttcattctaatgataaagtagtagagaaattggctactaccaatattttaatgaataactattttgaaaattctagaaatctttctatttgtattttcaatttttttgatagagaggactgttttatttgctttatgtagctagacacggggagacagattggaacaagaaaggaattatttcagggcgaagcgacattgctttgtctaagataggttatcatcaagcgactttattagcagaagaagtggctaaccttgacgcacctataaccagaatcatccattctcccttaaatcgtgcggaagaaacagcacgaatagttagtgaggccaatcatttacccatgagtgtcgatgaacgattaattgagctggattatggggattatgatggaaagagcgatgaactggcaggctaccaaaaaattcgtactcaatttgctgtacgctatcctaatggggaatctttgatggatgtttatgctcgaattgttcctttattagcagaattagaacaagacgctgagaatacctatctcttggtctgtcataattcggtgattcgagcgattaagaactattttgagcccttagaaaatgaaaaggtctttaattatcgcacacctaacgctaaattgatcgggtttgagtggaggaaagctctctcaaatatcaagagtgcctgaaattcttttaaattaataaatagaaaataagaacgaacgactgtagggctatctgaaccgacccccaaaagttagaccaaaaatctaactttttggaggtcggtatttttatgactgaatatggctttgaaatcaagctgaaagttgttcaagattatttggatggaaaaggtggctatcgctatctagcgaaaaagtatggagttaagaacgcggatcaagtaagaagctggattaattcctatcaacaatttggtgaggaaggactctttcgaaaacattatgataatacttactctgttcaattcaagatggatgcgatagagttatatcaaacgagtgagttgtcctatcgtgaagttgccaatagactcggtatgaggaatcatgctctgattgccagttggatgcggagttttcgagatgatggtatcaagggactctcaaaaccgaaaggacgtccacctaccgtgcctaagaaaaaagaaaagccaaagaaagattttgttaaagtaacatcggaagaacgcgaccgtattaaagaattagaaaaacaagtccgttcacttcagatagaaaatgcctttttaaaagaactgaggaagctgcgaaatcaggaagcccaacaaagacgaacgaatcaatcgcacgaatcatccacagcctccgaggacccttcaaattagttgagcttcttgagaccttggactttcctaaagcaacgtttatgtactggcaaaaacgatttgacagagaaaaccctgatcaagaaattgaagccgaaatgcttcgtattcgtaaagaacataaaaattatggctgtttacgaatgacgaacgaactaaagaatcgtggattccatgttaataaaaagaaagtccaacgtttgattcgaaaactaggaatcgaagtgcgttcatacacgcggaaatcacggcgctacagttcttaccgaggaaaagtcgggaaagtggcgaaacaccggattcgtcgtcacttttatacgactatttgtcaccaaaaaattacgacagatacaacagagttcaaatatcttgaagtggataccaaaggcgtgatccgtcagagaaagttatatctggacccgtttatggatatgtataatagcgagattctttcgtaccgcatctcggaaaagccaaatgccttggcaatcatggaaggcttagaagaagccatagcgatcacgaatgattgcccgtatcgtcgcactttccactcggatcaaggctgggcctatcagatgaaagcctaccgtcgaaaactaaagaaacagaaaatttttcaaagtatgtctcgaaaaggaaattgtttagataattccatcatggagaatttcttcagtcttctaaaacaagaaatttttcatggagaaacctatcacagttttgatgaactaaaaacggcgattgatgattttatctattactacaacaatcaccggatgaaacagaaattgaactggaaaagccctgttcagtttcgagaaacagcacagaaagcggcataatcgcttagcttaagaaacaaaaaacggagtagatttctctactccgaaaaaagtctaacatttgggggtcacttcaatcattgttgatagttccacagttgttcgttcttttaatgagcgtgttctgctactcatcaacagttttgtcgttcttccgtcacagtggtttctttagatcgttgcgtgcattgaatgaatcgtctggatggtatgacgccatttttcttgttctgcagtggaaagctttaacggaaaactttcactgattccttgtcttgaaacttttgcaggagaacccacatagcagccctcagcttgatgataatggctgactggtacgacaaggtgattgtcgtttaaaattgcttcagcaatccgtgcggcttgaatggcgataccataagaagtatagccttttcctctaaaagtgacccaaccgccatcacgagcagcattatccagaacatcaagtctatcatccgtcaatatttcactgataggggtgccaccgattcggacgctagaccaagcaacaaattgactttcaccatgttctccgatgacataaccatcaatggccgaaggatgaactttcatacttttgctgatagcatgcttcattcggccagtatctagtgaagttccagtaccaataacacgctcttgaggaagttctgtcaattcctgcagatattgagtgatgacatcacaaggatttgttatattcaatataattccctcaaagcctgaatctctgatgactggcgcccattcctctacgattgttttggtcaaattcagttcggcaaagcgatcaggatttccttcaaaaatcgaaatgtcaccagcagaaaaaataatcacatctgtatcggctagttcagctacatctggaccaatcagtcgaacttgattagcttgttccatttgcccgtccatcagatcattcagttcagcctttagaatcgtatctttcgagtcgaaaagcaccagctcatcaacgatattttttgaaatcaaagtgtaagcagttgtacttcctacatgtcctacaccaataattgcgacttttctcaattgcaacacacctctctcatagatttatctattttaaaaagaatgcctctaacatgagaaaaagtcaatagaataattagtaaacgattaattcaaactgttttcttttaaaatatgatacacgcgctcacaatcagcagcggttcctcgcagctcataatctgccaagaaaggaaacttgaaggcttcgctatattgttttgctgtcaggcaatattgatagttaaaatttttattcccgctgccgaccactcctagacaatgtttaaaattatcttcgtattcgaggtattcgcgcatcacttctgtcaaaatctcagtatccccgctatcaacaccatttcctccttctaaatacgtagggacaaaggtaaagaagggtgccgactcaatctcgaagggagaattttcggaaatttcctttgaaccgattaaaggatttttcggatctaattgatgctgttccaccgcgtaggcttccagacgcttaacaaatgcccgagtgtttcctgagatagaaatgtacaatatattcataaaaatatttcctcctaatttggttaatcaccgtttttttacgaaaaaatcgggttttaattgtagtcttaacgttaagattataacacgaaaaaggacgagtagataaagtgtaaacggttgcaaaaagcggcgaaatatggtataaatatagatgtaaggggtaggtccctaaggttgtaaaataatacaacagaaatggacggaagcagtgttcatttcacagagaatgccgaaaacggcagaaaggaagtagggatttgaagtctccttaccaagttattctaatctagcggggaaaagaaatgtagacagtggaaccatttcttcacttaatggtgaggcttaaacgaaattcaatcataaaaaacgtttaagacctagaaaagagtgtaaatattccagaaatctggaatgaagaacaagcacttagccattagacctgctagattatttttgcgcctaaaaaaggccagctgatcagtcagctggccttttcctattatactacttattgtaataacgaatatcaccgctgattttattgatagcaaaatcagttgaatcagagaaggtatacgtacctccatcggttgggagtttttcgttaaacattttttcatatttatcgatagaaagctgcttgcgttcagaaagtaaagactgattcttttcgctagttaaatgacttttgaacccatccatcaatgtcattgagaagaactcactaacggcaccagaaccatagctgaataatccgattcgatcaccggcagctagattgccattatctaacaaggatatcaaacctagatataatgatccggtgtagagattaccgactgttcggctatacaccactgcttcatcataacgagcttctaaacgttgttgttctgattcaggcatttccggaaagattgcacgtaaagctttgcgtcccatctttgtataaggtagatggaaagtgatcgcagcataatccgtactatcggtttgattgacttttttattttgctcccatatccgagtaaatgaatcaatatagatttggttagacatgtgtccatcgactaatggataatcatgccctgcaggtcgccaaaaatcataaacgtcctctgaatagaagacactatcgttattaaaggctaataaatctggctccttggttattagcatagcgacagcaccgcaaccttgcgtaggttcgccaccagttgctaaaccatatttagcaatatcagcagcgatcactaaaactttacgatcgggatgtagggcaacataatcatgagcctgctgcagggcggcggttccgccgtaacaagcatgttttatttcaaatgaacgagcgaatggttgaatatccaacagatcatgaatgattaccgcagcggattttgagaagtcggtacttgattctgttccgacgattaccatgtcgatgtcctttttgtcctcatctgtaagaattttggcagcagcacttgcccctaaagtgacgatgtcttgtgtctcgggaataattgccatctgatcttgtccaagaccaatgtgaaatttgttggggtcagtttcacgggcattcgctaaatctgtcatatcaagataataatttggtacgtgaaaactgattttatcaatccctatattcatattgctcctcctagttcttattgatccatccattttttaataaaaatgaataaaccacacatatctttccacttaattactaaaataataagtagagcagacatccttttcttccaaaggtaaatatatcatagaaaggtcataattagttgagtttgaatcttaagaaattataaaactatctgtgctatacttacgtctgatttttaatgaaaacattggaggtgcacccttggaagaagtagttattttaagcgctgtacgaacaccaattggcagatataaaggcaaactagcaactgtttcagcggttgagctcggtgcgattgcggtgaaagaagcaatcaaacgtgcggagatcgaggcagatcaagtcgatcaggtatttatgggaaatgttttgcaagcaggtaatggtcaaaatgtagctcgtcaatccgcagttaaagcagggataccctatgaggttccggcaactacgatcaatgaagtgtgcggctctggaatgaaatcgatcatttttgggatgcagcagattttgttgaatgaggcgagcgttgtgattgctggcggaacggagaacatgtctcaggctccaaaggtgacaagctttgattatgcagcccaagaatggcacgaaccaaaatcgagcatgatctatgatggtttaacagatgcgtttagcggaaagcatatggggttgacagcagaaaaggtggctgaagactatcatgttacccgtgaaatgcaggatcaatatgcctatgattcgcaaatgaaggcagcgaaagccagtaaggatggcaagtttgaatcagagatcgttccgattgcactatcagacggtagtaccatgtgggaagatgaagggattcgctttgattctactctggagaaaattagctccttaaagccagcttttaaggaaaatggcgtcgttacagcggccaacgcttcaacgctaaacgatggtgcatcagctgtcgtattggcagcgaaatcctatgcaattgaacatggactgacttacctggctgttattaataattacagtgaagttggaattgatccaagtattatgggaatggccccagtatctgcaattaataaattattaaaaaaagcgaatcgtacaattgatgaaattgataccttccaaatcaatgaagcatttgcggcagcttctgttgcggtgcaaaaagaattaaagctatctgatcaaaaaattaacagttacggcggcgcaatcgctttgggtcacccaattggtgccagtgggacgcgaattgtaacaaccttaatttctgagctgattcaagaggagaagcaacgtggtgtagcaagtctttgtattggcggcgggttaggtctagctttgttgatcacgaaagcagaggatcaagaaatcgcaaaaaaaaaattctatcagatgacccaagctgaacgtctagctaaactggtgaaagaaaaaaagttatcagctaaagaagcggcccagttagcaactgaaacggtgctgccggaaaaaatcgcgaataatctgattgaaaatcaaatcagtgaatgctcgattcctttaggtgtcgctcaaaattttgttattaatggtaaaaaaaagctaattccaatggctaccgaagagccctccgtaattgcggcagctagtaacgcggggaaaatcattgcaaaagcgggcggaattcagacgcgagtggttaatcaagggatggttggacagatcgttttacgaaaggacactgatttcgatgcagtaattaaaacgattaatgaaaataaaaagagtctttttgcagcggcagaaaaaagctatccttcgatttatcagcgcggcggcggattgcaatccattcatgcacgcacctttgaagaaggctacatttcgatcgatgtagttgtcgatacaaaagatgcgatgggcgccaatatcttgaatacgatgctggaagcagttgcgcaagagctgcgacaactgcttccaatggcggatatcttgttcagcatcttaagcaactatgcaaccgaatcgttgattgaagcacgatgtgagatcccactgacacagctaacaccggaagtcgcagaaaaaattgctgctgcaagtgagtttagcaagctcgatccataccgtgcggcaactcataataaagggattatgaatgggattgatgcggtcgtcctggcaactgggaatgatacacgtgcggtggcggcagcttgtcatgcttatgctgcacgcaatggacgttatgaagggttgacggattgggtcataaaagaagaaaaactcgttggacaattaaccctaccaatgaaagtcggtattgtcggtggggcaacgaaggttttaccgaaggctcagctaagtttgaaattattagaagtttccacggcggctgaattaggcgaaatgattgttgctgttggattggcgcaaaatttagcagccattcgggcactagtgacagacggcattcaaaaaggacacatggcgatgcagagccgctcattggcaatcactgctggcgcgaccgaaaaagagatcgctcaggtttcaaggcaattgcgtcgagcagaccagatgaatctcgcgacagctgagacaattatcaaacagctgcggcaagcataagttcacaaagaaaagtgataagatcatgaagttgatcttatcactttttttatgttattcattattgacgtctgcccgcaggtaaaccatatcaaccaattgaacgtcctgatcaatgattggttcgtggtaattatcggtgaaaaaattcttcacgcgatgcgattcgcggaatccgctttttttataaaagtccaatattcctggctcatcaccagttccgacatacatcgtttgataatgacctaaaaattcatggaataaaaactggatcattgctctgccatagccttggccatgtacagctgggacagttgctatgtttttcagctcacattcctgttcattcaactctgtgacaacggctgcgcacttcaaagcatcatcatataaaacaaacatgcggccgtcatcaaggtaacgatcaatcatgtcttcctgtggatcggctaaaagaagcaagtttaaatagtttttcttatctgtaacgacttcttcaatctgcattttttttaaatgcagaatagggaaaggattcccttgctcatctagctcagatcgcccgatcacaaggaaacccatatgccgataaaaaccaaaggcctgctgattctgctcattcacatctacatagtgtatatttagcgaatcaagcgcaaattgcagtaatttttttccaattccgtttcctcgagctttgtttgcaacgaaaagcatttcaaccttatcttgctggacaccaataaatcctaaaagctcaggatcataatagccataaagctgatcaatcagctgaaacgccttttttacctcgggctttaaggcttcgatatcattctttgtcaaaaaggtgtgggtagctttaaccgctgattcccaaatcgccatcattgtacctagttcgtttttattttttcggtcaacttgtttaattgtcaacattctatttttcctccaattttgtctataagaagaggtttcaagccgcaacaaataaacgtgtataaatccgcgcttaaaaattggcgatgaaacaactcttatcgtatctccaaacaatgtttcatctacagtagtttccttgtttggagtagagtaatggtgcgtatattgaaggtgaatttccacattgaaataagtccttttctatgatttcccttcattctatcaacgagagtgaaagaaagcaatgtaccttggagttaaagctattttatttaaaagtgaaatccaaatatactggattatggtcagaatatttaaattgcatgtccttgatgtgaacagcttcaacattgatattatctgaaacaagaaacccatcaatcaaagtcgtgtaggtcttgccctgtttatagggttcatttaatgctcgagcggatggctttttctcttctgccagctttccagtaggcaggtgaaagcctgccggcaattcttcttttggaaatggatgtgtccaggtttcgcgttttttacttgtactaaatacgtctgggctgttccccaaaacatcatgattataatctccagccaccatcacatagttcccttttttatattcgctttccatgacatcaaaaatcttcttcaattgagccgcttggatggagcgatccttcgtaaaagcggacaaatgggtattgatcgtaataaactcatgaccgtttttgactggcatacggctgacagtgaaggcacgatccaaatcaacaaatttgttgaagtttgtttcgatcggtaaagaatagcgtttactgctggtgatctcagcttggcttagggtgactagccctgattttgcttggccgattgggtcagtaaagggatagaacaaataagaagagtcgtagttttgcccatacaagctgttgtagtcagataaatggtctttcagaaaagccacttcgtctacatgctgtgaacgatcgccatcttgatcgacttcttgataaaaagcaaaagtaggttctaattcttttgtcgtggtgacaattccctgcatatttttttctaccgtttttttatcatacgctcgtgagtatttcccaccgtccataaagaagctatagctcggcggataagccccatatccaatgttatgactcatagcacggtaagtcttattggtttctaaaacctgattatgttgattgtcgggttttaaggtaagatggtcaggtaaacggtcatagctggcgaataaataaattaaatagccgcctaaaaccaaaatgatggctgttataattcctaaaagaatctttcctatttttttcatgttgcgcctcctagtcttctcttcaagcttatcatagcagaattttaactattcacaaagttcctgactttcgaaaagaactttcccatggtacactatagaaaaggaaatatacgttattaaaagagaggttttaaaatgattcgatttgccaaaaaagaagatggcgcagcagttgcaaaattaatactggttattttaaaagacatggagttggatttcttagctgagtttggtgaagagaaggccttagaagttatcacggcttgctttgaagatccgacttatcgcttcggctatgctcgaggtctagttgaagaaattgatggcgaaatcgcaggggctgtttttggttatccggccaataaagaaaagattatcgatttgcctttagaaaattatttgcgttcacaaggaatttccgacgatattaagatgtttattgatcctgaagcttttcctggtgaatggtatttggattcaatcgcagtggatgaaaaatttcgtggacaagggattggttcaaagctgttaacggcggtagatcggctggcgacccacgagggcgaaaaagttatcggcctaaatgtcgacaaggctaatccaaatgctaaacgtttatatttacgtgatggcttcaaagacgttggagaaattatgattagcggtcatttatacgaccacatgcaacgagaggttaaaggctttgatcgcatcaagcgtcacaaataggcatataagaaaacggctaatcgcttacttaacgtagtaaacgtattagccgttttaacagttttgagaaaaggttacttctaacacagtttcttgttctttttttctattgcggttatacagccaataatccataatcgccgccacacaaatacagactggggcgtctgctggatctgtgacatccaagacatagtaatcaccagttaataaggtggctttatccatcgtcatgattggctggttaaaatgattaatcttatatttatggttgtaaatatctccataaactgcccaatgaagctgctgtatgtaataaaaatccccgggccaatggaagattttgtgaagtacaccaacttttgtatggtcatagtaaatctcaaacttgcgcccgaaaatcacactggcttgtttgatatatgctacgatttgaccgtccattgcatagagggagagcacatttcctttacgtccccaatgtcctaccattaaataaagtggaacacctttgttgtctttgacgatcgttcgtgtcgtggaacttaattgtttttcttgaataaaaaattcagtcatgatgctcacaccttttgatttttattattcagaaaggattcgatcgattgccgttgctactccgttttcttcgtttgtgtcagttacatgtttcgcaattttctttatagcgtctactgcatttcccatcgcaacactcgtaccagcatatgttaacatgctgacatcattaaaattatctcccagtgccatcacttgatcagcggaaaatcctcgttcttccgcaaactgctttaaggcgatgcctttttgcgcatcgacatgattgatttcgatatttgtcaattcagatgccgcaatggcgaggtctccgatcttttctagctctcctgttatcgctttaagctgttctggcccattcttatcaaacgcgataatcttcaatacatcttcttctttatcgattagtgtttgtcgcatatcttcaacaaaagtaatcggtgtaagtgataaatgtcgcgatgaggcagcgatcgccatttttttagaaataccaggtattttatcaatgatatgctctgagaaaaattcaatccgcttcggttgatttgaagaatatacatgttcggcggtaaaaatttcataataaaggccagcttcttcaatggcatccatcacttcaaatgtcttttccttgccgatcggaatggtaaaaatggtttctcgttcggcgttcaccacatgagcgccgtttaataaaatcatcggtacgtggatgtccgcttcatctaaggagattttggcgtggctcattccgcgtccggtcgctgtaataaattcaattccttgtgcttgagctttctgaatggctgcgatatttgctgttgggacttgcatttgatcgtttaacagtgtaccgtccatatcagaggcaatgagttttatcaaaattattcacctagctttcctatcatacaccgatagtgtaccataatcccaaagaggatagccatgtcgagagaattctttaaaaagaattatttgggtagaaaatggtcttctcgacgcataggctagttttttccatgtaaaatggagagtttttactaagaatagaagtaggagtgtagagcatgaaagaaattatccataatgattggcagacggttttagcagatcaatttcaagcgccgtactatttgaaactacgagaattcttgaagcaggaatatagcactcaaagaattcatccagatatgtatcatatctttgaagcgttggaattgacaccttacagcaaagtcgaagttgtaatcttaggacaagatccttatcatggcgtaaatcaagcgcacggcttatccttttccgtacagccgggagtcaaaataccaccttcactacgaaatatttatcaagaattgcaaaatgatttagggattccgccagttcagcacggcaatctcgtaagctgggccaagcaaggggttctgatgctcaacacggtgctgaccgtacgcgaaggccaagcctattcacatcgcggtcaaggttgggagcaattgactgacgcaattattcaacgattaaatgagcgtgaaaagccgatcgtctttattctatggggcaagccggctcaagaaaaaatcaaaatgattgataccaataagcatgcgatcataaagtctgttcatccgtcgcctttatccgctcatcgaggcttctttggatcaaaaccattttcaaaaacaaatcagattttgaaggaatggggcgagtcaccaatcgattggcagctgcctgaaacagtgtagtatgacaacggtttctgttatagagacagtttgtgaaaaacctcttaattcatgtttactagattctaatgagtagtacagaggttttattctgtccttttcttttcatgtgaagtgttgtatgatgaaaaggaaataaatatctggaggttttatcgtggatctatttgatagtttgaaatttaagattattcgtcgcaacattaaagtggcatttcctgaagcaactgacgcgcgtattcttggtgccgcatctcgtttgaaagcagaagaattgattgaaccaatcttgattggcaatctggctgaaatcgaaaaagctgcgggcgctcgtggaatcgctttagagaacttcacaattattgaccctgatcattttgatcgttgggatgaaatggttgaagcctttgttgaacgtcgtaaaggaaaagtcagcaaagaagatgcggaaaagattcttaaagatgaaaactacttcggtacaatgctgacttatatgggcattactgaaggcatggtttctggagcgattcattcaactggagatactgttcgcccagccttgcaaattattaaaacaaaaccaggcgttagccgtacaagtggagctttcttaatggttcgcgggcgtgatcaagagaaatacttattctcagattgtgccatcaatgtgaatccaagtgctcaagaattggctgaaatcgctgtcgaatctgctaaaacagctgaattattcgatattgagcctaaagtcgcaatgatgagcttctcaacaaaaggatctgctaaatctcctgaggttgaaaaggttgcagaagcaacgaagattgctcaagaattggcgccagatttcttaatcgatggcgaattacaatttgatgctgcctatatcccaggcgtggcacaattgaaagcccctgattctcaagtagctggacaagcaactgtctttgttttccctgaattacaatcaggaaatattggttacaagatcgcccaacgtttcggtggttttgaagcgatcggaccaatcttacaaggcttgaacaagccagtttctgacttatcacgcggctgtaatgaagaagacgtttataagctatctattattacggcagcacaatcattgatgaactaagcatcgttaaatcaagaataaagcgagaattcgtgtattatgcgaattctcgctttttttgctcttttttagagatcgttgggaaatttcccagcgttagacacttaagttcaatcatggaacattattcccagtgttttcctatagtattgtaaacgctttttactgtctgtatagtcagacgtgtaaataggaaaaaggaattattggaaggagatgtgtttttgtcatgatggaaaagattcagcgctttggtggggcgatgtttacgccggtactactattttcgttttcagggataatggttgcactttgtatcattttcaaaaatccaatgcttgtaggcagcatcgcaagtgaaggaacgacgtggtattccatttggagtattgtagaaaatggtgcgtggacagtcttcaatcaaatggagttgctgttcgttatcggcttgtcgatcgggttagccaaaaaggcgaatgcacgagcagcgatggaagcgtttgttgtttatactacctgtaactattttatttcatctatgcttgaatactttggcaaatttttcggtgtaaactttgcagctgaaccaggaggagaaagcggacttaaattaatcggtggaatcaagacactagataccggtattattggtgctattttcatttctgcaattgttatttttctacacaatcggtatttcgaaaagaaattgcctgactttttaggaatcttccaaggatcgtcattcattgttatcttgggattcttcgcaatgctaccaattgcttttctgatttgcttgatctggcccaaagttcagcaagggatcggatcactgcaaggttttctggcaagtgcaggaatcttcggagtttggctttatactttcttggaacgcatcttgataccaacagggctgcatcattttatctatactccctttgtttatggtccggctgttgttgaagaagggattaccaaatattggatgggacatttacaggaattcgcgcaaacaacgacaccgttgaaacagttattcccagaaggcggctttgctttacatggaaactcaaaaatatttgcatcgcctggtattgctgcagctttctattttacggcgaaaccagaaaatagaaagaaagtgctggcaattctgattccagcaactttaacagcagtcttggcaggaattactgaaccattagaatttaccttcctatttgtatcaccgccactatttgctgtacatgctctgttagctgcaacgatggccgcgactatgtatggttttggagttgtgggagatatgggtggaggtttaattgatctattggcgaaggtttggattccattgttccaaaaccataaaagtatgatagtcacccaattgattattggacttgcctttatcgtgatttatttcttcgtgttccgttttttgatactgaagttcaatctggcaacaccagggcgggaggaaaattcgcaagacattaagttatattcgaaaaaagattacaaagccaagcaaggtagtaacgtgccagtgattgaaggcgcgaatcaatatacggaacaagcagctgtttatttagatggttttgggggagctgaaaatattgaaaaggttaataattgtgccactcgcttaagaattacggtcaaagatgaagcgcttgttcagccagatgatgtttttcgatctggtggagcccatggagtggttagaaatggaaatgcctttcaggtcattgttggcctagatgtaccacaagttagagaacaatttgaaacactgatgaatatcgaaaattagagaccaaaggagagaatgaaagatgaagaaattttcaattgttattgcaggcggaggaagtacatttacaccggggatcgtattgatgctcttggacaacctagacaagtttccgatcagacaaatcaaattttacgacaatctggaagaacgtcagaatcatgtggcgaacgcctgtgaaatcctgttgaaggaacgtgcgccagaaattaattttgtggcgacaactgatccagaaacagctttcacggatgttgattttgtgatggcccatattcgtgtcggattatacgcaatgcgcgaaaaagatgaaaaaatcccattgaaatatggagttgtaggtcaggaaacctgcggacctgggggaatcgcttatgggatgcgttcaattggcggcgtattagaattagtagattacatggaaaaatattcgccgaatgcatggatgttgaactattcgaatcctgcggcaattgtagctgaagcaaccagaaaactaagaccagagtcaaaaatcatcaatatttgcgatatgccagtaggaatcgaggaacggatggctcattcaattggtttgaaatcacgtaaagaaatggttgttcgttattacggattgaatcattttggctggtggacagatatccgtgataaggaaggcagtgatttgatgccgcagattaaagcacatgtcaaagatcacggttattcattaccagaagagattgaagaatctcaacataccgatgctagctggatgcatacatttgctaaggccaaagaagtttacgcattggacccagagacattaccaaacacgtatttaaaatattacttctatccacaagatgaggttgctcatgcaaatccggaatatacacgggcaaatgaggttatggctggacgtgaacagcatgtatttagtgaatgtgaccggattgctgaagcaggaacggctgaaggaacatccttagaagtggacgagcatgcaagctatattgttgatttagcacgggcgatcgcttataacactcatgaaagaatgctgctgattgttccaaatgaaggagccatcgttaactttgacgaaacagcaatggtagaagtcccatgtgtggtgggtagcaatggtccagagccattaactcaagggaaaattccgcgtttccaaaagggcttgatggagcagcaagtagcggttgaaaaattagtcgttgaggcttgggcagagcaatcctatcaaaaattgtaccaagcgttggcactttcgagaatcgtgccgaatgcacgaattgccaaagaattgttagatgatttgattgaagcgaacaaagaattttggccagaattaaaataattaatatgaaaaaaatcaatttttcctccttcatcacgtataatagtgtaggagggggaaaattatgacattagaacagttgattcatcagcatttagatgagcttagtgatttagataaagatatcttacaatttatgcttgcgaatcctgataaggttcgatcttcggggatcatggagcttgccgaaatggttcatgcctccaaatcttctgtgttaagaacaactaaaaagcttggattttcagggtattcagaattaaagtattttctgcgacacactgaaactagccagcagcaggaaactagcgataaggatatttttgagaagcaacttgatgatatcaaaaagacgcttgaatatatgcaatcagtgaacttggagccaatcaatgagatgttcgataaaagccaaacgatttattgttatgcaactggtttttctcaaaaaaacattatcgatgaattctacaaaatgttattaaatgtcgataaacgtgcactggttttgccgaataaaacagagttggatatggtcatgccgatgattactcaaaatgactgtgtagtaattgcttccttaagtggagaaacagatgatatcaaagagaatctaacagcatttgaagttcgaaaaattccagtactggcggttacagcagttggagataactattttgctagacacagtacgcatcatttgaatttttattgtgactttttcgttattggcagacgaagacttcaatcacaatccttgattggactaagctgtttaatggactacttgcttcgctcttatggcatttacacactggataaaagtactgattcaacgacttaagatttatttacgttttgttatgaaaggaagagtttaaatgatagcgcttagatcaatgaatgttaaaagaaatctgttacttggttattggattgtactgccggtgctcttttatttttatttatttttggtaagctttaatcagcacgtaacgattcaacagcttatcctgcaaattccgggattcacgctagcatttctgctatcttttttaatgctttttcaagccgcttgtctttatctgattggcgctcaaaatgaaaagaagtcgttgattgaaaaacgctttttgaccttcagcttgtttcaacagattttgacaggaaatatcattggcgcggctttatgctatttctatagtagaaacatgtttgctgaaaaacagactgcttcacggaatgagaaatttatcttctgttttgcgattggatttattagtttgatcagtgtggtcgtcatagttattgctacgaggttgaaaggggtataagaatgttttctatttttaagaagaaccaaaccagcatcttcagtccagtggatggcaaattgatcccgctatctgaggtaagtgatccggtcttttctcaaggaatgatgggaccaggttttgcggttgaacctgcatcaaatgagattttttctccaattacaggaatagtaaccagtgtctttccaaccaaacatgcgattggtctggaaatgagtgacggaaaagaggttctgatccatattggcatcgatacagtcgagctaaatggtgaaggcttcgatgtacttgttggtgaagccaataaagtaacgcctgaaacgaagctggcgattgtcgatcgagcatatttagcagaacagggaaaagaaagcacgatcatggtgttgtttcccggcagttcggatacctattcgattgaggcgaaaacagtaaatgctggtgatgagattatttgatgtagaaatcgcttgagcgtttgtaagtaaaggcaagtatggtgaagagatcatcatgcttgcttttttgtgtccggaaaaaataaagaatctttttcttttctctctaagcgtaaatcgttatactaaattggtagcagaaaagagggatacagcgtgataacattagtagatacaacagcaacagaaagattaggaaaaataattggtacggtggcagagcctagcgataatttagtattaacgggtgatcttggagctgggaagacaactctaacaaaagggatcgctttgggtttaggaattgatcaaatgattaagagcccgacttacacgatcattcgagaataccagcagggacgcataccgctttaccatatggatgtctatcgcattgaggctggggcggatgatttaggcttagatgattatttcgaaggcgatggtctttccgtagtcgaatggggccagcagttaggcgagtatatgccggaggattatttggagttgattttatctaaagatgatcaggatgaaaatctgcgtaaagtcgagttgcttgcaaagggaatacaggctgaaaaatttcagagtcgcattttgaaagcgtgggaagcggaatgagtgaggtcgagatcacgctaagagaagcaatcccggacgacgctgcagccttattgcaggtgagtcagaaaatcgctgaggagacggactttttaatcatggatgaagttggtttaggcttgagtgaagaaatgttaagcctgcaattggctgatttatacgaaagtgagaacaatttattactgttagctttggcagatgaaaagatcgttggtatggcttcagtcaaggcggcgtcagaattcactgtcgcgcatattggcgaggttggtatcagtgtgttaaaagaattctgggggattggtttaggttctgctttattaaatgaggtcatttactggagcgaaaatgcttcaccgttgcggcgattggagctaaccgtccagaaacgcaatgaacgggcgattcatttgtatcaaaaatttggatttgaaactgaggctgagatgatacgtggagtgcgtgatagtaagggagaatttttagatgttttgctgatgagtaaattgatcaattaaaaaagcgaagcagagcgcttcgctttcagtccatctacattggtaaaactaattttttcaaaggatcgactccaaaatgatcctcttgataaagcaatatttttgcacaggctcgactgtcttctagggcatcatggtgatgctctagtggaatagctaattcttcacagacagtgttcagtcgatgatttcgcatttcgggaaatagacggcgactggttcttacagtacaaagtgacaaataagatggctgctctaaatgataataatccagacagccggctaatacctttgtatcaaagccggcattgtgagcgacgatcaaacgattttcctgataatagtgttggatttcttgccatacttcaggaaattttggggcattctccacgtcctctggatgaatcccgtgaatctgaatgtttttccagaagaattctgtttctggtttaattaaggaataatattcacccacgatttggctgtttttaaccattacgagtgctaatgaacaagcactatgtgtttggtaattggctgtttcaaagtccattgcaataaaattcaacaagggtcacctcttcgccattgttttaacatatttctttcagcggcgaaaggtttgcggcaaaaatttcaaacattttaaagattgatatccaattctaccgggcaatgatcgctgccgaaaatctcagtgtgaattttagcatcttgcagtttttcttttaagtcatcagaaacgacaaagtaatcaatccgccatccagcgttgtttttgcgggcattgaagcgatagctccaccaagagtagatgccctcttgatctggatagaaatgacggaaggtatcaatatagccgttctctaataagatactgaatttttctcgttcttgcggcgtgaacccagcatttttttgattggttttccaattttttaagtcgatgttttcgtgagcgacatttaaatcaccgcagaagatgactggtttcttttctttcagcgcattcagatagtttaggaaggcttcttcccacgtcatgcggtaatctaagcgcttcaattcattttgcgaattaggtgtgtagcaggtaatcacataatattcagggtattccagcgtgatgacgcgaccttcttgatcgtgctcatcaagcccaagaccataagtaacgtttagtggttcgtattttgtaaaaatagcggtacccgagtagccctttttctctgcataattccaatattcataatagccaggcagatccatttcgatttgaccagcttgcagtttggtttcctgcagacagaaaaaatcggcgtctaattcattaaagacgtccataaagttctttttcatcacagctcgtaagccattgacgttccaagaaataaatttcaatgttcattcctccatactaaatcttgtgatttactcatggactcattgtaacgaaaaaaagtcagaaagcaaaggatgccagatcggcaaaccataattttgtagataagaaatatctaatgagatgtaaaaaattatagcgaagaaggagaatgataaatgaaaatcggagttatcggcattggaggaatcgcccaaaaagcctatttaccaacctatgctaaaatgcgcaaggaggcgtcattcattttcgcgacgcgtaatgatgaaaccagggataagatttctcgcgaatacaatttcgttaatacggttgcaacgattgatgaactgttggctgagaaaatcgacgcctgtttcatccatgttgctacaaaggtccattttgagatcgctaagcaatgtctagaggcgggggtctcagtatttatcgataagcctgttagtgaaaatttgcaagaggtgcgtgaattgcaggagctggcaaagtcaaacaagctgttgtttatggtgggctttaaccggcgttttgctccaatggtggaacagctcaaacagcttccgcaaaagcatgtcattcatttggaaaagaatgaaccgaatcatgcgatgaatacacaatatggtatctatgacttattcattcatttagtggataccgctgtttatttgctggatgatgaaatcatgacggtgcattcaaaaattcgtgaagaaaaagggaaaatgacctatgcacaactgctgctttcaacagctacaacagaagttatcctgtcaatggatctgatgagtggcgggaaaatggagcgttaccaagtcagttcacctgaacaaacgaatattttaaatcaattgaccgatttgacgatcaaaaagggaacagtggaagaagttcaacgatttggggattggacgaccacgttagaaaaacgcggatttgagcagttagttatccgttttattgccgcattaaaaggtgaggctgttgatttgcgtcagaaaaatgttttgttaagtcatgagttgtgtgaaaagatgctgcagcagcatattcgtcatcaactataaggggtggtaagtttttttctcgcgtgctaaaatagcaaagatgtttgaaaaatttacccgtaatgaacgagaaaggcttatcaaagtgaaaattactgaattatcgagcgcattaccaaacgtgaaagtccttttggatgaacctttaatgaattatacctttacaaaaactggcggacctgtggacgctctagcatttccaaaagacaatgaagaagtgaaagcattagttgatttctgtcgatcaaatgacattccctggattgttttaggcaatgccagcaatctaattgtccgtgacggcggtattcgcggattagtgatcatgctgacggatatgacaacgatccgtgcagaggaagatacgattactgctcaggctggtgctaagttaatcgacacaacatatgttgcgttggatcattcgttgaccggctttgaatttgcttgcggtattcctgggagtattggcggtgcggtcttcatgaatgctggtgcatatgatgggcagctggaagatgtttttgaatcagtggatgtattattagctgatggtacatttgaaacgtggtataaggatcaaatgaatttctcttaccgtcactcagcgattcaagatcaaccagcgattgttttgagtgctacctttaaattaacaccaggtgactacgaccaaatcgaaaaacggatgaaggaacttacagaattgcgtgaattgaagcagccgttggagtacccttcatgcggaagtgtcttcaaacgtccggttggtcatttcactggaaaattaattcaggatgccggcttgcagggattagtctggggtggcgcgcaaatctctgaaaagcatgctggttttattgttaatatcaacaatgcgacagcgactgactacattgagttgatcgctcatatccaaaagacaatcaaagaaaaatttgatgtgagcctagaaacagaagtccgaattctaggtgaagaaccgaaataataaaaatgcttggaagaaaaccgtgatggctttctttcaagcatttttctattttttcattaagcgcaatagaacggcacaaatggccatcgttgcgataccggcaacagctgcttcaactaagccgctaccaaagataattcctagaatgacactatagacggtatctgctgtgacctgcaaaacatttgcgtagctgtctttaaagaagaaaaagattaggttcatcactaaaatcgtattcgtcattgagcctgctaaaccagcgataaacaagctgactggtcgtgccttttgcttcattaaggtatggagtcctttgtaaacgaagtagggcaccacaccaattaaaatacgaggaataattgctacgataattgcgcgccaatcaccttgattcgttaatggattggcgataaatggtgagaagacaaaagacattggtgtgataacgatcgttgctcttgctaaactaatcaccccaaagacagctcccagaccagcaccaatgcgaggacctaatacaatcgaagcaataatcacagggatgtgcatggtcgttgcattgataggtccaattgggataaatcctaatggtgtgaccgctaaaatgatcatgatagctaaaaacatcgcggtcaaagtaaaacttttaacatttttctctttcatttgttactccttcaattttgaatttacgatatgcacaatttcagcaatatctgccaaggcaccgcgaccataatcgccgcaagcaagcaaggcttctcgaggtttaatttcttgataaccaacttcttttagcgttgccaaatttcgttggacaatcggattttgatacatataagtattcatagctggcgcgataacttttggtgtatccggcagcaatgctaaagctacggttgatagtaaatcgtcagcgatgccgttggctaatttaccgataatatttgctgaagcaggggcaaccagaaagagatcggctgctttagccaaagcaatatgattaatcaatgcggcatcgggttcatccatcacatccaagtggacaagacgatgcgacaaggattggatcgttaagggcgtgatgaattccgtactgctcttggtcatcacaacatctaagttatagcccagtttagtcagttgattggtaatgtcggcagctttgtaggcggagatactgccgctgactcctagtaagatgtttttcattttgcttcctccagtttcatgacctcttttttgatcagttcggcaatttcagtttttgtctgtgcttctttgactttatgctgtttattgatcagatagccatgatgtttttcaccgcgaatttccgctaaatcatttgccaagataaaatcagcttgatttttttcaaggctggctttcgctacatttaataattcaatcatcggcacgtcaactaataatttaaagccaaccaaaatcgtttgcggctgcaattttttaatcaaagaaatgatttttggtgttttctttagaaccacgactaaatgatcggtatctgaagagatttttttctctgtgcgctcattggcgacttccactaaggcttttggtaagtctactgtttttgctgctattactgcttcaaggtcttcaagagtgaccgaactttctggtgtgaaatcactgaccgccatgctatgaatgactgcatcataggtattttttttcattaaatccttcaatgccttttcaaggtctgcggtagagtcaatcaaatgatgatgaatcatttttccttcaggttttaccgcgtgacgtgtagtaatcatatcaatagtcacatcatctttcgcaaagctttccgcgatcgcttttcctagcttaccgctggaatgatttgttatcgcacgaacatcatcgattttttctgaagtaccgcctgaagttattagaattctcactggtttgttccccctaaagcaacgattgtacgtcctacatgctttccttctaacagggcattcgccgtttccaatacttgctctaattcaatttgttggacttggaaatgatcagacaaagcccattcattcgccatttttttccaaagcttttggcgttgctccatcgaagcttcgactgaatcgatgcctaataagttaacacctcgtaaaataaaaggcaagacagttgtactcagtttgatgccgccagcatttccgcataaagcagcacttccgccatagttaataaaaggcagaacctgagcaagcgtatcgccgccgaccgtgtcaatgacaaaatcaaagagctgcttattcaacggacgggctttttctggaaacagttcagtaggagagagaacagcggttgctcctagctgctgcaagtaatccttttgatcctcttttcgacttaacgcagtgatttctttacagccgatttgttttaggaaatgcaaagcaacaccgccaacaccgccagtcgctccagtaaccaatacccgactctcagcatttaatccatgaatttgcaacgcatcaacagcgagtgcagccgtaaatccagctgtaccaaagatcatcgcctgttttgcagacaagccttcaggcaggtgaacgacccatgcagccggaacaacctgtacatcgcttaagccaccatcgtgcttgacacctaggccgaagcctgtgactaatacttcgtcaccagattggaactttttatccttactttcaataatggtacccgctaaatcaatgcccggcgtcatcggatactcccgcaacacaccagtattgggcctagtcgctaaggcgtccttataattgatgccagaataattcaccttaactaatacttcattctcttttatttcaggtttagtaaagttttcaatctctgtgtgaagggtttcatcattgattacacgtaaacggcgataagtcattagttgttagcctccctgtacttaaaaaaatagttactattatcttagcggaaatgaaagaaaaagcaaatttattttctcgttagtttccattaaaatcgtgaaagaatttcattcagatcgcttgatttttaggaaaaagttcgtatactggaatggtgctattaaacaagaagtttactattagcaaacaaggaatggaggactgagagtatggagattggtgagaagctgcgaaatcttagaatccaaaaaaatttaacacaagaagagttaggtgaacgaaccgatttgtccaagggatacatctctcagttggaacgtgacctaagttctccttctatggagactttttttgatattttagaagttctaggtgtgacaccagctgaatttttcaagcaaaagaccggtgatcagaaaattgtctataaagatgaagacactactttttacagcgatgaggaacacggttatcatattaagtggctgattcctgaatcgaatgagaaggaaatggaacccattttgttaacgttggacaaagaggggcaatataaacagtttacgccttcgttgtctgaaacgtttatctatgtactaaaaggcaaggtggcgttgcaatttggcgaaaccttatatgaggcggaaaaaggcgaaagtatttattacgaagcgagtaaaccgcatcggctgcaaaaccaagcgaatggagtcagcaaagtgctgatcgtcgctacagattcttacttatagaaaaggacgtgaagtcatggcaaatacaattatttcttttaaagacgtgagcaaacaatacgacgatgacgatccggtattgaagaaaataaattttgatattgaagagggacgcttttataccttattaggaccttctggctgcggaaaaacaacgattttaagaattatcgccggtttcacagacgttagtgaaggcgatattttttttgagggaaaacgaatgaatgatattccggctaataaacgtcaggtcaacacagtctttcaagattatgccttgtttcctcatatgaatgtttttgacaatgttgcttttggtttaaaaatcaagaagctatcacaaaaagagattgagaaaaaagttttagaggcattaaagctggttcagctaccaggttatgaaaatcgggaaatcaccgaaatgtctggtggtcaacgtcagcgggtggcgatcgcgcgagcgattgttaacgaaccgaagattttattattggatgaaccattgtcagctttagatttgaaattacgaaccgatatgcaatatgaattacgtgctttgcaaaaacgtttaggcattacgtttatctttgtgactcatgatcaagaagaggctttggctatgagtgatgagatttttgtaatgaataagggtaagatcgtacaaagtggtactccggttgatatttatgatgaaccaattaatcactttgtcgcggattttgttggagaaagtaatattgtcgctggtgaaatggtggaagataatctggtcaaatttgtcggcaaaacctttgaatgtgtcgatggcgggatgcgtcctaatgaaccagtagaggttgttttgcgtccagaagacttgacattaaccacacctgaacagggcaaactggttgtgacggttgatacgcagctgttccgtggggttcattacgaaatgaactgtattgatgcggacggaaacgaatggatggttcattcgacgaagaaagccaaaaaaggcagcaaagttggactgtattttgaacctgaggacattcacgtcatgcgtttcaacgaaagtgaagaagacttcgaagctcgcttggaaagctatgaagattagggagggatcactatgaaaaatatgcgtcgtttatattcaatcccttactttttttggctgctgttttttgtcattgcgccggtgattttgatcgtctatcagtctttctttgatatgaacggcaattttacgttaaccaattatcacacgtacttaacctcaaaaacctatttgatgatgaccgtcaattccgtactatttgcctttttgattacgttgatgacgctgttaatcagttatccaacggcgtactttttatcgaaattgaagcatcgccaattattactgctgctggttgtcttgccgacatggattaatttgttgctgaaggcgtatgcctttatcggtatttttagcgcgaacggttcggtcaatgatttcttgagttttatcgggatcggacagaaacagctgctattcactgattttagtttcatgtttgtggcggcttatatcgaactgcctttcatgatcatgccgattttcaatgcattggaggaaatcaatccttctttgatcagtgctagtcgcgatttaggagcaaataattttgatacatttcgtcgggtaattttcccgctttccttgaatggcgtaaaaagcggtgttcaggctgtctttatcccgtcgctctcactcttcatgctgacgcgcttaatcggtggaaaccgcgtgatcacgctaggtacagcaatcgaagaacatttcttggtgacgcagaattggggcatggggtctacgatcggtgtgattctgatcgtggctatgtttattgtgatgatgctaaccggtgaaaaacgtaagggaggtcgggtgaaatgagaagaagaaaattttcctggtccacagtttatttgatttttgtgtttattctattgtacattccgatcttctatttgattttttattcctttaatcagggcggcaatatgagcacctttactgggtttacttgggaacattatcaaagtctgttttcagatagtcgcttgattagtattgtcgttcagacctttgtgctggcatttttgtccgcattgttggcaacgattattgggactttcggtgcgatggggatttattatacacgtaagcgaaattcaagaaatgtcctattggggctgaataacatcttgatggtttcaccggatgttattattggtgccagctttctgattctctttacgatgcttggtggggttttgaagaatttccaattaggctttgtcagtgtgctgctttctcatatcgcctttagtattcccatcgttgttttaatggtgttaccgaagctgaaggaaatgaatgattctatgattgatgcggcgcgcgatttaggcgcgaataattttcaagtgttatccaatattatattgccatttttgacaccgggaattattgcgggatattttatggccttcacctattcattggatgattttgctgtgaccttctttgttaccggaaatggctttacgacactttcagtcgaaatttattcacgggctcgacaagggatcagtttagaaatcaatgccttatcgactctggtctttattttctctctgttgttagtcgtgggttattactttattagtcgtgatacttcgaaaaaagcacggaaacgcaaacgcgattttgaggaggtggcaatactgaaatgagaaaattacaatcactttttatcggtgtcgtcgccatcattctcttactgacatttttagtcattcgcttgaatcattcttctaatgctagttcaaaagttttgaacatttataattggggcgattatatcgatcccgatttgttgaaacaatttgaaaaggaatacggctataaggtcaattacgaaacatttgattcaaacgaagccatggaagccaaaatcaaacaaggcggaacagcctatgatattgcgattcctagtgaatacatgattcaaaaaatgaaaaaagagaaattactactgccattggatcattcaaaaattcatggcttagaaaatattgattcacgttttttagatttggatttcgatcgagacaataaatactcgattccgtatttctgggggaccttaggaattgtctataatgataaatttgttgctggagaaaaaatcaagcattgggacgatttgtggcgcccagaattgaagaacaatatcatgctaatcgatggtgctcgagaggttatgggcttgtccttaaccaccttaggctattccatcaatagtaaggacatgacacagctgaatcaagccatcaaaaaattaagcagcctgacgcctaatgtcaaagcgatcgttgctgacgagattaaaatgtatatggcaaatgaagaaagtgcagtcgcggtgaccttttctggagaagcagcggatatgatgtcggaaaacgagcatctccattatgtgattccacctgaaggttcaaatctgtggtttgataatatcgtgattccaaagacctccaaaaatcaagaaggcgcctatgattttatcaactttatgctgaagccagagtcagccaagcaaaacgcagaatatatcggttattcaacaccgaataaaaaagcattggcgatgctgccaaaaagtatttctggtgacaagcaattttatccagacgatgagaccattagtcatttggaggtttataaagatttaggtccagaatatttgggaatctataatgatttgtatttggagtttaagatgtatcggaagtagtgtgggaactggggaaaacagcttcaaacaaaaaaatataactattaatacacagcatatcgtcaaaaagatgtgctgttttttttgatacaagaaatgtaaatatttataatgctatctatttgtgagcgatatttttctgggagagacttaataatttgcttgatgagaacgagcgaaataagtataactagcgggatgattttgaacagtaaggataacaaaaatatgatagtatttagtggcttgagctactgtgattttgatcgtatttcaataggatttaagaaaaattgatataaaggttgtaaaacaggggaaatcacctgttttttttaacattaaaggaagtataacattttaagaggtcaaaggattgatacatcaatcttttgaccgcttttcatctggtctttttcctattaaactggagatatgaaacccaatattttacacgccattttctttgatgaatatcaaaactgggagaaattcaatcaaaggtacacaagaaggattcgatccgttgtgaaaagagaagtgaagaagtttcgcgattgtggtgaccttaaaaaaggttatcgtctatttgtctgtgaaggatgccatgatgtaaagaaagtggcttttcgttgtaaagggaaattttgtccaacttgtgcaactggggaaagtcaacggtgggcagaggttgcggcgaatgatctgtttacagtgacgcatcgacacgtcatcttcacgatcgatgaaggtttacgtgagatttttctgaaggagaagtatcgtaaggagcttttaaaaggattaatggatgaagctgcacggatactattagatttttttagaaagcaccatatacaagctggggttgtggcaacactccacaccttcggttctcagctagaatacaatccgcatgttcatttagtcgtcaccatgggtggactgacgaaggatggaaaatggaaggactatgactattttccgttcgcaatgttgaggaaatattggcagaatgcggtcctaaagctcattcgaagaaccttatcccaatgggataaggcacgagtccagccgcttttacaagcggcgtacacgaaaaatgcagagggtttttacgtgcatgcacccaaaaggagccgaacttctctcaaaaagatattagaatatatcagtcgttatatgaaacgtggtcccattgctttaaatcgtatccttttgtacgatgggaaaatagtgatgtttcagtatcatgataaacgaactaacacggataagataaagacgatgtcggcagaggaatttattggtgcactgattcgtcatattccagagaaccagttcaaaacaattcgtagatacggcatttatagtcggcggatcaagacaatcatgaaaaaagtattaagtaattaccagaaagagattcaacgaatgcttgtgaatgtgaagaaagcacttaaaccaaaatcatggtgtgaacgaatagccgaagaattcggagtaaatccattggaatgtactagatgtggcgaatattatgaatttagtggagttagtgtgtctaaaaatggacgacttgtagtgaaatatgcgaagaataaagaatcggaacgattcatgcgagaggagaataaaaaaattggggaagaagcatcgaaacgtaagtatgaaaaagaaaaagaagcagcttttaaaaaacttcgattccaatggagtggttcattacatttgtcttgaatgtgggataaaggaaaaaattccaaaggaagtagttcaatttttggatgcaggagatgttgcatttgatcctgagaacgctccgcaatttgattgcgaaaaatgtggtggagagatgtatccagaatactataagaacgtacttggatacgaatttagaatcagtgatcgacaataaaatgatttatctaaacaaaaagtcctcaggagcggttttctcctgaggttttcttaacattaaaggaagtataacattttaagcggtcaaaggattgatacatcaatcttttgaccgcttttcatctggtctttttcctattaaactggagatatgaaacccaatattttacacgccattttctttgatgaatatcaaaactgggagaaattcaatcaaaggtacacaagaaggattcgatccgttgtgaaaagagaagtgaagaagtttcgcgattgtggtgaccttaaaaaaggttatcgtctatttgtctgtgaaggatgccatgatgtaaagaaagtggcttttcgttgtaaagggaaattttgtccaacttgtgcaactggggaaagtcaacggtgggcagaggttgcggcgaatgatctgtttacagtgacgcatcgacacgtcatcttcacgatcgatgaaggtttacgtgagatttttctgaaggagaagtatcgtaaggagcttttaaaaggattaatggatgaagctgcacggatactattagatttttttagaaagcaccatatacaagctggggttgtggcaacactccacaccttcggttctcagctagaatacaatccgcatgttcatttagtcgtcaccatgggtggactgacgaaggatggaaaatggaaggactatgactattttccgttcgcaatgttgaggaaatattggcagaatgcggtcctaaagctcattcgaagaaccttatcccaatgggataaggcacgagtccagccgcttttacaagcggcgtacacgaaaaatgcagagggtttttacgtgcatgcacccaaaaggagccgaacttctctcaaaaagatattagaatatatcagtcgttatatgaaacgtggtcccattgctttaaatcgtatccttttgtacgatgggaaaatagtgatgtttcagtatcatgataaacgaactaacacggataagataaagacgatgtcggcagaggaatttattggtgcactgattcgtcatattccagagaaccagttcaaaacaattcgtagatacggcatttatagtcggcggatcaagacaatcatgaaaaaagtattaagtaattaccagaaagagattcaacgaatgcttgtgaatgtgaagaaagcacttaaaccaaaatcatggtgtgaacgaatagccgaagaattcggagtaaatccattggaatgtactagatgtggcgaatattatgaatttagtggagttagtgtgtctaaaaatggacgacttgtagtgaaatatgcgaagaataaagaatcggaacgattcatgcgagaggagaataaaaaaattggggaagaagcatcgaaacgtaagtatgaaaaagaaaaagaagcagcttttaaaaaacttcgattccaatggagtggttcattacatttgtcttgaatgtgggataaaggaaaaaattccaaaggaagtagttcaatttttggatgcaggagatgttgcatttgatcctgagaacgctccgcaatttgattgcgaaaaatgtggtggagagatgtatccagaatactataagaacgtacttggatacgaatttagaatcagtgatcgacaataaaatgatttatctaaacaaaaagtcctcaggagcggttttctcctgaggttttcttatggggaaaccaaataaggaggtagtgtaagctcatgttgcacaaagtatgcatattattggataacaaagtttgtagatttgaaaacgtttttaaagtattttgagagtgtaagggtgatgaatatgaacttagaagatagaaataaccaagtattaatggaactaataaataatccccaagttactagtaaagttttatatgaaaggtttgatctatcaagaagtcaattgaattacgctttaaaaaaaatcaacgattttctagaagatggaaagttaccacaaatcaaaagaacaaaaaaaggccattttttagttcctaatgtagtggtatctgtatttggaggtggtaaagaaaaagaacgtgaaaagaaagcgcactatgtattttctggacaagaaagaatctggggaatcgaattaatgattttggcaaaagaagagtatctttcgttaaatcatttcatcgtggaattagaggttagcaggaatactattttacgagacttaaaaagaatcgcagaagacattgaaaattatgggctgaaactaaagtatacacgacagaaaggatactatttccatggagatgaatggaataaaagagaactgctgtcggcaaccttaatgaatttggcagatatttatgatggaatcaattgtattattcgattttcaaaaattgatacagatctaattgaggttttcaagaatcgtatcgggttagtcgaagaaaaattaaatattcaatttactgatgatcgcttaaaggttttgccactattaattattctaattattcggagggcaaaaagggggaaacaaataatctataatttcaaaattgatgattttgaacttgctgatacaaaagaattcttggcagcggaacacattatttgggatgtagatgaaataagtagaaatgaacgagtgtacctaactttgttattgcttacaactaatctatcgcaagcaaacattctttcagttagagaaattgataatttaaaagaagccttatttgaagtattgaacaattttgaaaaagtatctggactaagtgttgagcgtaaagaaatattgttagagcgcttattgattcatatgaggccagcgtattatcgcattaaataccatctaaatctgcaaacacgattttatcaagagaataaagacaccgatttgttttcattattttatttagtgaaggagtctagtgaacctcttgaggctttttttggagaggaaataccagatccagaattattcctgatttctttattcattggcagtcatattgttgaaagtacggagatcattcgagatgaaaatagaaggcgggcaattattgtttgtccgaatggtatctcaatctcgctattgctaaagaatacgttacagaacttattaccagaaatcgactttgtagagttaatctctgaaagaaaattctatcgaaataattacgatgttgacttcattttttcagctattcctctggaaacagagaaaccagttttcgtcgtaaataatttcttaactgatcaagaaaagagacagttaagggaacgggtattacgttcagtgacactagctcaaaacaccgttataaatccagaaaagatcatgtcattgataaagaaatatgcggtgatttctgacgaagaaaatttatatcacgaactattaacgttgtttactccaaaagatttcgagagattagagaagaaacgtattcatttgatcgatacattaaaaatggatacgatccaaatatttgatgatgccatagagtggtcagaactccttgataaattggcccggcctttagagaagcaaaaggttattagtaaaaattttgtaacggttttaaaacaagagatgcccatattacctcaatatacggttttacgaaataccataggtctgccgcatacgatgagtgaagcaggagcgctaggagtaggaatcagtatgggaatcgttaagaaaggaatacttactgaaaatggatcaaaagtacacacagttgttctgttggcctctaatgataaagataaacatgttgatttgatctttgaattgatgagcttagcaggttcagaacaactaaaaaaaatagaagaagcaacatctatcagagaaatacgcactttgttagtagattttagtgaaaaatattggaggaactaagagatgggcaaaagtgacaaattaagtttttatgttaagactcctttgatttttgttcaagaatctttttcgaattctatcgaaatttttgaacaggtctatgaacacgcattagagctaggatgggtcagaagtgattttctagaacgaataaaacaacgagaggagacatttccgactggaattcagttggaaaaatttggtgcagccattccacatacggatgctgaatgtattttaaccgaatttgtggcagtgattactaataaggagcctgttcaatttactagcatggaggacaaaaataaaaaagtaaatacggatgttattttcattttgggattaaatcaaccacacgcacagttagaaatgctgcaatcattaatgaaattactacaaaatgacaatattttagaagaagttttaacagcaaaagattcagagcaattactttatgcaattaaaaaaattgaaaaataaaaggagacgattaatatgagaaaaattaaagtattggtagcttgtggggcaggaatagctacatcaacagtagttatgaaaagaattgaagatctattgcaggataataacattgaagcggatgttgaacaaattaaaattgccgaagcggtatctaaacaagaaggggccgatatgcttatctcgacaacaattttaccgactcaatacaaaataccagcaattacagccttgggatatatcagtggagtaggcgctgataaactagatgaaaaaatcttggaaattgtacgatctgtcaattaataaagttagttaaaaatagtggccgctatttaaaataaatatataaggaggatttatttgaatgaaagctattaacgatgttgtacagtatatccttaatttaggacctactgtcatgctccccattatgatcctaatcatagcactcatttttagagtaccatttgggaaagcattaagatcaggattaacaataggaattgggtttgtaggtattaatttggttattggtgtgttatcagataatttagggcctgcagctcaagctatggtcgaacgctttggatttcatttgactgtgattgatactgggtggccatccgcagcatctgctgcatgggcttcgccggtttcagcagttttaattccgatttgcctgattgtaaacgttatcttactactgttaaaagttacgaaaactttagatattgatttatggaactattggcattttatcgctgcgggagcaacaggttatattgtaacaaatggcaactggtggtttgctattttatgtgccgtattgtatgagattgcttgcttgattattgccgataaaacagcacctttagtagcgaaattctatgggttggaaggcgtaagtttaccaactggatcaacggtggcatttggcttagtaggtatcccaattggtattgctataagtaaaattcctggtttaaataagttgcacgctgatccagaatcgatccaaaaacggtttggaatttttggcgaaccaatgatgatgggaattattatcggggcagccattgctgcactaggcggttatgatattggaggcatcttaaaaatgggcattaacatgggagcagtaatgttcttgatgccacggatggtaaaaatcctaatggaaggtctcatcccgatttcagagtctgtcagagattttttacaagaacgttatggtgaaagagaaatttatttaggcttagatgctgcggttaccactggacacccagctaacttggcaaccggcttgcttttagttccaataactttatttatcgctgtaatattgccggggaacaaagtattaccttttggtgatttagcaactatccccttttatgtttctttaattgttgctcatcggaaagggaatattattcaatcggtattaacaggaactgttgtaatagcattggcattatacatggcaactaattttgctcctgttcatacggaaatgatgcgaggcgtgtatgagtttcccaaaggagcaacacaagtatcaacactcgatatgggcggtaatttcctaaactgggtaattttgaaattttctcaactggtttctggaatcctttaattttttatagtcactactgaattaagggactctaaaatgggtcccttaattttttgaaagggaggagttttgtcatgaaagccgcattgttaaaaggattgaatcaatttgaaatagaaactatcgaaaagccaattcctaaggagcatgaggttttggtaaaaattaaagctgcaggaatatgtggatctgatatccataaaatgcagaacgaatggaaatatgagcttcccatggttatggggcatgaattttctggagtcattgaatccataggaagtaaagtaaaaaggatattgattggcgatcgagtggttgtagcgcctctgatcccctgtcatgaatgcgtctattgtgaatcgggaaaatatcagctgtgtgaagactatacaatgataggttctcaccggtatggcggttttgaagagtatgtgactgttccagaagagaacgtgatcaacattggggaaagcatttcttttgaagaggccgcaatgattgaaccattagcggtagcagctcatggtgtaatgggtttagatcctaaaatcggagatacggtagcggtatttggtttaggtacgatcggaatattaacagttcagtggttgcgattaactggtgtaaaaaagattattggcattgatatcgactcaaataagataaacgaagcaaaaaagtacggcgtaacagatacgataaattctttagaagaatcattagaagaaagaatatttaagctaactgacgaccttggggtagatattgctatcgaatgtgctggttccaaaattacagaagagcagtgcctgttaattacaaaaaaaggcggaaaaattggctaccaaggaatcgcttattcagatgttctattacaccaacgagcttttgaaaatatttttagaagagaatatacaataaacggtttctggaattcttattcagcaccttttccgggaaaagaatggatacattctgcgaagtttatcgaacaggggaaaataaagctaaaagaattgatttctcatcgttacgaattggcagagattcaaaaagcatttgatctgacagtgaatcgtgaagaatcctataacaaagtaatgatttttccggaagatagaaaagaggaaaagaaatgatgaagggtgtttcaaaacaagcctcaggctacgatcaaatggcatttatcgatttatctgttccagaagcaacagatgacaaggtcttgattaaagtcgcttatacaggtatttgcggatcagatatccatacttttaaaggtgaatacaaaaatcccactactcccgtcgtcctaggacatgaattttctgggcaggtagttgaagtcggatccaatgtaacaaaggtcaaagttggtgatcgggtaacaagtgagacgaccttttatgtctgcggcgaatgcgattattgcaaggaaaagcagtataatttgtgtccccatcgaaaaggaatcggcacgcagcaaaatggctccatggcaaactatgtgttggctcgagaagaaagcattcatttactgccggatcatttaagctatgaaggtgcggcgatgagcgaaccattagcgtgctgtgtccacgcgatgtatcaaaagagtcacttggaattaaaagacacgatcattatcatgggccctggaccaatcggactgtatcttttgcagattgccaaggaaattggagccttcgtcattatgacggggatcacaaaagatgctcatcgcttagcattagcaaaaaaactaggtgcggatgtgatcgttgatacgatgaaggaagatctagcgaaagtcgttaatgagatcacggatggctacggtgtcgataaagtgtatgatgcctcaggtgctgtaccagcagtcaatgctagtctgccgttgattcgcaagcaggggcaatttattcaagtaggcttgttcgctaataaaatggtggatttagacactgaatcgatcattcaacgagagatcgaatacatcggcagtcgttcacagaacccttatgactggccgattgcgatccacttattagcgaaaggtgcgatcaatatcgatgagatgattacgaaaaaatacccgttgactgaatggcggaaagcctttgataaagtgatggaaggcaacgaaatcaaggtaatgatcgaatccaatccagaagagttcactgattaagggaaagctaagtaaggaggagagacatggaaagttggttgggtttagataataaggtaattattgtaacaggtggttctgccggaatcgggcgtagcatcgttaaatatttgatagaaaacaatgcacaagtggtgaatttcgatttaaagagtgccaatcaacttaaacaaaaaaattattatttttataaagttgatgtatcaaaaaaaactgagatagagcagcaagtagctcatgtctttcggaaatttgggcgaattgatggtctggtaaataatgcagggatagcgttaccgggcatgttaataaatcctgataacactgggaagtatgaattaaccgaggagctatttgaccggactgtctcagttaatcagaaaagtgtatttctgatgagtcaagcagtggcgcgtaagatggttctgcagcattctggagtgattataaacatgtcgactgaaagtgctatagaaggatcaatcggacaaggtttttacgtaggtacaaagggagctattaatagcatgacttgtacttgggcaaaggagttaggtaaatataatatccgagtattaggagtagcgccaggaattatggaggaaacggatctgcgttctgaaaagtatgaagaaaccttagcttttgttcgaggaatatcaccaaaagaattgagagaaggctatgtaaaagcttctagtatacccctcggtagagcaggaaaactaatggaggttgcagaagtagttgccttctatttatcagagcatgccagctatttaaccggtattatcacaaatatcgctggtggaaaatctagaggatagggtggataaaaatggagtatatgttggatactgtttgtttaaatagtattgaaaaatatatgaatgtagtaccaattaaaggaataacctctacaccgagtatcattaaacgagaagggaaaattgattttattcctcatatgaaaaggacacttgaaataattggggatgatcgcacattgcacatgcaagtcgttgcaaaagaacttgagggaatgatcgatgatgcgaaaagaatttggaaccaaatcggtgaagaggtctatgtaaaaattccggcttcaaaagctggtctgaatgcgctaagtattttaaaaaaagaacatgccaattgtcgaattacaacgtcagctgtttacacaaaactacaggcttttctagcattagaatctggagcagattatgtagctgtctacactaatcgatctgagaacatcggaattgatccttttgacattatcagctcagccacagagtacacaaaaagaaatgcattgaacggaaaaattatggcatctagtattaagaatgccatgcaaattacagaagcgatagaatctggagctgatgcagtaactttttcgcctgcaatactagaggatttttttgatttagcggcgacaaaacaagcgatagaacattttacaagtgattgggaaaatttatatcagacgaaaaatatttaactgatctacaggttctttcatttttagaaatgggattcgtgagtattgctaataaattgagatgagatagttattagttatgaataacattgatgcgagaaattgattctattcaaatgttgtgtgggatttcttccatagagtagagtgatttttcaaagaattatcaaaattccgcagcgagctgattttgattttgtaagttcgctcaaaataacagtacaataattttgtctttgaagcggtctttaagatatgttattcgattaatatgaagaaaaaatgtaataatcaaaaacgagtaatttctgcgtcaatttctgtttagtgaatggctgcctagtaataaaaagcggctatagtcaggcagctaaggagaattgaatagaactctttgtagttttatttttgtaattgtgacaataatttttatgtcataaaaaggggtctcaggtagaatatcagaaaaaatagtattgacaattaaaattgactcaagtaatattactattaaattaaaatataattaagctatgaaaagaaaagtaataattttagattttcagagagtctctggttggtgaaaagagatagtcgaacgttatgaaaatggtctttgagcattagttatcgagagagagatctttagatgctacgggttcacccgatatagtgataggttatcgaaatatttccgtaaccgaaaagtggcttgttttaaaaacaagtaatgaaggtggtaccgcgataaggtatttttatcgtccttgatttgtattctaaatacagatcgaggacgatttttttgttttctattaaaaaggaggaagagaaatgagtaatgaaaaaaaaatgaatggagcaccaatcgctgttttaggaggaggtgcagctgcaaaagcaatcgcagctgattgtgttttaggtggaaacaaggtgaatatttgtgatttgccggagtttgcagaaacaacactgaaaaatatagagcgtacgggaatattacttacggggaatcaaaacaacaagtatggattcaagcgctcaggcaaagcgataatgaataaaatcaccacaaatgtaaaagagtgtgttgctggttgtaagctggtgattgttgcggttccgtcaattgcacatgatgcattctttgaagagctggtacctgcgttagaggacaacatgattgttcatattattcctgataattttggatcgttaaaactgagaaagaaaatgcgtgaaaataattgtaataaaacagtagttatcggtggttggtcgagtgctccatatggagcgagaatagtcaaagagggaggggtgttgactcctgaagtcagtttaatgtaccgagcaattactttgcgaggggcctccttaccttcaactgatcaagagatatttttacaaagtacaaaagagctgggctgctttgataccatcacagaaggcgatggaccaatcggagggaaaactgtattggatattggattcagcaatgttaatccagttctgcattgtccaggaacaatcttaggtgtcggagttatggagaattggggcagagtttttggtggaaatgacaaaagtacctactcaatttattcacatgcctattgtgaatcgatttcagaagtccaatacgcattttatttggaagaagtagctttggccgaggcaatcggtgttgatcttcagcgttttcctaagaaaaatttcctttcacgaacgagtattttggggcctgaatacatgggagatgagtgcatcgtgccgtttgatgaacagtttgagatggctattggaacaggtccattcagtattcatgatcgctatattaccgaagatataccagtaggctgccatgtttatcatgaattaggaaaaaaattcgacgttgaaacgaaggtaatcgacagcatgatcactttggcttctgttatgactggccaagatttttcaaaagaaggcttgaccttagatgatttagggattggaagcttagacaaaaatgcgttattggattatttaaatcgcggggtgatcgagtgagaaaagccaagaatcttcaaacagaggcagacttgatttcaactattcaagtcgctccaaccgcattttcagggtttgcgattggcataatagcagtcaatttaatctatcctaaaatacccggcaatgtagcgaatgcgacgaccttcgcctttcctgttctttatgaagtagttgattttgaaattgaacagctatttgaaggaagtaaacaaattcaggagcaggtcatcgatgcagcaaaaaaattagagaagcagggggttcgagcgattgtcggggcatgcggttattttggacattttcaagaagctgtctcagaagctgtagatattcctgcatttttatctagcatcagtcaggtgcctattattaagctaggactcaaaaaagagcagaaaatactaaccctagttgctagcggaaaagatataaatgaagcatttttccgttcatccggagcagatttatcggattgtatcattcgagaaataggtactctagaaagcttttctccgattcgttgggggaaaaccgagttagataatcaaaaactggaagcagatttagttaaggtggtacagactgagttgaataggtcagcggaaattggagcgattttacttgagtgcagtgatcttcctccgtattcctatgccattcaacaagtatccggattgccagtctttgactttattagtttaataaactgggtgcattttgcagtagttcaatcaaaatattatggacacttctaaaagaatctataagaggagtgaatccgacaaaataagaaatgaataaggagaaaatattatgaatagaaagacaatcattttttcaattttattaacgataatcttcgttttagcaggatgtacgaaggcttcgacaaatgaaaaaaaggaagatacgttagtggtaggaacgttacccaccccacatggagagattttagagtatgtgaaacctatgttagaaaaagaaggagtcaaattggaaataaaaaactttgatgactatatccttcctaataaagctttggctgataacgatattgacgcaaattattttcaacatgttcctttttttgagcaagcaataaaagaaaatggatacaaatttgcggatgctggagctgttcacgttgaaccaatgggactttattcaaagaaaataaaatcagtggcagatttaaaggatggtgcaacaatcattacttctaattctgtatctgattggggtcgaatcattacgattcttcaaaatgccggtttagtcaaagtgaaggatggggttgatcttgaaacggccaattttgaggatattgaagaaaatcctaaaaatttagtattcgaacattcaattgatccatcacttttaactagtgcatacaacaatgaagaaggcgatctagtagcaatcaatgcaaattttgcttatcaagcaaagctgaatcctgttaaggatgcaattcttttagaggaagacaactccccatatggaaatattatcgctgtacgaaaagaagataaaaatgatccacgtgtaaaaaaacttgtcaaagtattacatgatgaagacgtacaagaatggatattgaagaaatgggaggggtctgtaaaacccgtttcaatagataactaatcattcaaacgttactcgaacttatagatgcggattttggatagagaattttaattttgaaaagaataataatgagggaaaagtagaaaagctataaattttagttttccaactttctgcctgaaaaatctgaaacgtagataaaacaatactttaaatcgttatatccttaaataggatgtactttgaaagtagagtaaaagacagtaaaaaatgatcataaatcagttttaaaattgcatgagaaatctacatttttactgtcagtttttcaatattcttcaaaaagaaacggcgattttgccgtttctcagaacagactgtagacaaagtccattttatggatgatgtctacagtcttttcttttataatagatttatgaaaacgaatgcaaggagtgatagttatgatgtctaaaaacaatacgaatggtagaaatcaatttgcgatgcttacgattgatgatctagttcctcaagatcatctcgttcgaaagattgatgccgcgcttgattttgaatttatttatccaatcgtcgaagccacttactccgatttaggtcgcccaagtatcgatccagtgattctgatcaaattggtgtttattcagtatttattcggtatccgttccatgcgacaaaccattaaggaagtcgataccaatgtcgcttaccgctggtttttaggctattccttcgaggagaaaatcccccatttctcaacttttggaaagaattatgtccgccgatttagagaaacgacggtgtttgaggatatttttgcctatattttagaacaagcagttaaagcaggttttgtaacagaggataatttgtatcttgattctacccacatcaaagctaacgccaataaacataagtttacgaaagaaatgacccatgatgaagcgaaagcctatcaggatgaattagaagatgagatcaatcgtcaacgaatagaggccggaaaacgcccttttactttggacttagaaaaggaagtgaagctgaaagaaagaaaaataagtaaggctgatccggaaagcggctactacgtcaaaggcgaacgagaaaaacaatttgcttattctgcccatacttcatgcgacgacaacggatttattcttagcacaatcatcactcctggaaatattcatgacagtcaagtcgcctttcagctcgtcaaacaatcgaagagactttttcctgaaatcaactgtgttgtcgctgatgctgggtataagacacctaagtttgttcactttttgactcatttgaaccttcgaccttgtttgccttattcaaggcctaaagggaaaaaggggctattatcaaaaaacgagtttctctatgacgagtattatgattgttacatttgtccgcaagatcaaatgctcgctttttcaacggttactcgagaagggtaccgagaatacaaatccaatccaaaagaatgtgtgaactgtcctctgctaaaccaatgtaccaaaagtaaaaatcatcaacgagtcatcacgagacatgtttggggagatctgatggatgaagtggaacatcttcgcctaacggatctgaataaatcaatttacaaaaaacggaaacaaacgattgaacgaatatttgcggatgcaaaagaaaagcatgggatgcgttggaccaagtatcgaggcttggaaaaagtcgcgacgcatacgatgctagtgtttgctgcaatgaatttaaagaaattagccacctggctatggaaaggcaaggagcctttatttttttgttcaaaatttcgaaagaaatcagataaaaagacgtctcaaactcaaattacgagttcgagacgtcttttgtctacagtctgagaaacggcgattttgccgtttcttttataacgcgagtagttaagatatgagttttgattagctaaccactcgcttttttcatctattgtcgtattagcgtatataaattgttcggaaaaagacaaatcttgaattcaatacgaatgtaaaagagtattttcaaggagataaatccgatcaaagaaaagaattaatcttttaacaatagttgaggttcttttttagcaatgtaactttctagtgttgttcgatcaacgagagctgttgtaataccatcacgtgagactagaaatcctgccgcataaatagcaatttggatagctttttccaaacagtagtctcgtaacaaatatgcagacaatgcactaataaatgcatcgcttgctccagtgctatcaacagcggagaagttggtagcagggaaatattttccttgcttagaattcttaagaaaacagccatttttacctaaagtaacaataacgtttccgacacctttggaaattaaaaaatcaaccttttcttcaatcgttttgtaatcggggcataatgaagttaattcttcctcatttggaatgagataatccaccttagctaaaagagaatcaggtattttttttgaagcagaaggtttcaatattgttttaaccgcattttctgtagctaatgtacaagtcatttctacagcatcaattggaatctctgtttgtacgagacaatatttcacgttagagaatagcttatgtttatttttgataaatgtaggcgatagttctgcattcgctccgggtaaaattgagatcattgaatcaccgctagattctacagaaatataagcctgacctgtttctgtctcgtttgagcgtgtgatgccttcagtatctacactatttttcttgagctcttgaaacattgtatttgagtcactatctgttcctatacagccaatcaaacgaacctgatgtccgagttttgcagttccaattgcttggtttaatccttttccacctggacgtttactcagattagatagaaaatttgtcgcaccgttatgaggaagcttcgaagaatagagataagtatccatgtttatacttccaacaacgagaactttagagcgttcattttctgctggaattccaattgattttgtattagccaaaaccattttttcattaaatggttttggctcttctgcttttgtaatcaggttgatgagcgcttgacatatatgagctccaaaatctgttttgttgatagtgactgttgaaagagaattttgataattcgtaaattctatatctgtatcattacgaatcgaaagtaatgaataatcattaggtgcttttagaccactttgcatggtcaaattgtagagctcaattgatttataaaaatcagcagatacgaacccagaaatttgtttttcaataataaaatcattgatagaaaaatctaatgtattgatgatcattgaatcattgaacttcaaattgtacttaaaaagagcttttttatacccattaataaaatgttctttacttttatcttctcgtacaatacaagcgattcttttgtgttttttttcaatcaattgttctgttagaaaataggaaatttcttcatacggaacccaataggatgcttcatctttccactttcccaataacacatgcggaatatttaatgtttcaatatgcttcaagttttttaagctgctttcatttatcggatcccaaattattccgtccacttgttttttacataaggaggtaatatttctaagttcttgtttgtgatcaccaagactgttaagaattatcggactataacctgtttgctgtgcatactcaatcattccgtttaaggcattatccgtatatttatctgaattaatcaatataccaattgaaccagtagttgtagtggagttaatggtagatgaatagggagtgtaattgtattcatgaactatttttaaaaccctttcacgagtttctttactaatactggcgtcttttttatttacgatctttgaaaccgtggatacagatactccagctaattttgcaatatctcttatattcatatacttctcctttatcctcgttatctttcttttcatcatactcaaccaattcaaaaagggtcaagtgtgtttgaataaaaagaacaaaaatttcgtgcttcaaaaaattatattgacaaatttgttatgcggtgataaattctaatcaaggaaaacgttttccgaaaatgttttcttaaattgattttatcacactttaaaaaggggaactacaatgaaaaaatactttcaagcatttctccataggaatttttcgacaaaggtacttgtattgataccaatcgctgttggaatcaacttgattggtggcacactctgttcagcgttaaagttaccactatttctagatatgattggtaccgttttagtagcatgtttggccggcccttgggtagcagcgctttgcggtctgatcactaatctatttttggcaattgtgacaaatccagtttttttcccttatgcacttgtcagtatcttatgtggattagtaacaggatatttagtaatggctggcttttttaagaacattggtggagcgatattcacttggttagcctgtacgttgacgaattcttttacatcatctttaatcactatctttgtatatggtggggcaacaggaattaacacaagttcactggcaacagcagcattgatagcggctacaaaagaaatcgttctttctgtattttcaacatcaataatagagaatttaatcgataagggattagtttttctaatcgtctattggttggtaaaaaaaatacccaaacgtttctctagtcaatatgcgcctttggacaatgctccgttgacaaatagaaaaatgaaaaactgaaggtgagattttgtgaagaaggataataaaatatatggatttattagagagttaaatccaattactaaattaatactagtcctaagtttaggcataggttgtatgatctatcccagttcttttttaggatactatttgttagtgattattctgattctctcttttttcatgggaacaggtagaaaagttagtttattgatactgggcttcggaatcccagttacgttgatgttactttttatccaaggattatatagtcctaaaaatacgataatcatagctgatttagggtttgctagcctcggtttagaaggaaccatgtatgctttaaaaatttcttctaccttattggtctttttgacaacattttatctttttttaaactcaactaaaaattcagaaacagttgcggcattaactcaatcgggtctaaatatgaaaatcggctatcttattttggctagcctcaatgttgttccacaaatgcaaagaaaagtgaaaattattcaagaagcacaagaatctcgtggtgttgaagtaacaggttctttcttacaacgagcgaaagcatttctaccgttaataggaccagttgttctatcttctttgacagatgcccaagagagagggatgacccttgagacaaggggctttagtattaaaggaatcaaaccaacaacactaatcgaagtgaaacataaacctagcgatacctttctaaaaggtttttccatttttttcttattaatatgtttgattgttcgattttggaattagtgaggtgattagatgaataacttagttgaatcaatagatttttcttatcgctacaatgaagctccaaatgcagctttaaggaacataagtttcgaagttcaatcaggagattttgttgcaataataggagcaaatggtgctggaaaatcaactttgtgtaatgcattatcaggattaattccaaattattttattggtcatacagatggagaaataagggttaagggagaaagtatctcggaaattggagtcggtgagttatcacaaacagtcggtctagtttttcaaaatccgtttaatcaactatcctatacagctgatactgtaagtgaggaattagcttttgggttgggaaatagagggttaaccaaagaaactatgatcgaaaaaatcaatagagtagctgaaatagttcagattactgacttattaaatagaaatccgttagagctttcaggaggacaagtacaaagagttgctcttgctgctgcaattattttagagcctcagattttgattttagatgaatgcactactcaactagatcctgtgggtagccatcaaattatgaaaacggttaaaacgttgaatgaaaatggcatgacaatcataatggtggatcatgacatggagaaaatagctagtttggcaaatagaattcttgtgatgaaagaaggaaaattagtcctaaatgataccccagaaggagtttttagtaatccacgactaatggaatatggcgtgagtgctcctgatttttatgaaataacaaaagactatttttccaatacgactattttgactgaggaacaggctgtcaaaaggttgcaggaggtgttgatgaatgaggattgaaataaaaaatctcatacataaatatccttctggagatattgccctaaatggacttaatacgatatttgaaggaatagaaccaatcgcgattattggtcaaaatggtgctggaaaaacaacttttgttaaacatttaaacggtctattgagacctactgagggagaggtactaatcaatggtgaaaacatcgagaaacatacgacggctttttggtctcgaaaaatcggttatgtctttcaaaacccagataatcaattgtttttggaaagtgtaaaaaaagaatttgaatttggtccaaaacaacaaggcgtatcgaaaaaagaaatcaataaaaggttagaaaagattgctgatttagtaggtttaactgataaactttccgtccatccattcgatttaaatacgacagaaaaaaaattctgtacgatcggatctattctcatgatgaatcctgaagtaatcatattagatgaacctacttgtgggcaagatatcataggaaatcaacgtttaactaggattattgaagcattgaaattaaatcatcaactctgtctaacaattactcatgatatgaaatttgttgtaaaaaattttgatcaaatcgtcgttatgtcgcatgggaaaatattaaaaagaggaacaaaagaagtaatattttcttcgccagaagtattagaagctagttatgtaagtcctccgccaattacaagagtgggacaaaaattaggattttcagaacctgtttttaataagaatgaattccagcaggtttttgagaaaaagagatttcaacaaagataaatgggtgaagtcaccctttatatagatatattaagaaagcggggataaaaatatggatgcaacaaaagaaaatgagaaaattataggtgttccaataccagaagagggaagtaaagagtttgaaaaaatgaatcgaatggctaaaaaagccatcccattgattttattgatattcacatttggtattttggaacaacaggcttttggtatgatttttgtcaatattggacaacagttgggagccaccaacttagctcctttaatcacttcaattccaggaattattttaggaattgtctgcgtagtttatggagcgctgggtgactttgtttcattgaaaaaaatgacattatttggagtaattatttttgttttaggttctatcattggctttgggtttggacctagtagtatttgggcagttgttattgctcgagttttacaatctgctggtggacaagtggccggttctgtctttttagttctagtttcaaagtatattgcaaaagaaaatcgcgtaatctattatggtatttttgtagctgtctttcgtttttcagcagctttaggtgttgttgccgctggctacattacaaaaattgattggcgttggttgttcgctgttccaattatttctgttctatttattccgtcgttggcgaaaaatttacctgatgaacgtgcagaaggagcaaatattgattggattggcttcatcttgattggtgcattcgctggtgcgatgacgatgtttttcactgatatgaacgcgttttgggctatctcatctgttgtaacgttagtactatttattgtttatattaataaagcaaaaaatccttttatcacaccagaatttttgaaaaatcctgcattgatagcaacaatgtcagttatattcattggatacttcttcagctacacattaaacgcgggtgttaatgccatcggactaaatgtttttgggattgattcagcagaagtatcactgttgttggttggttcaattttattggcagcggttttaggattcgtttgtgggccggttgttaaaaaaattggtcgttcagctgctattatcatggcgctatcttttatgggtctaggtttgttagctattgcttttgctattcctcacggtaaagtttgggcgttagcatttgcaccatgtatttattattttggaacttcattcttttactcaccaattgtagatacagcaaccttgacagttgctcctgaggaatctggtcgtgtattaggtgtcaatgacttggtacaagctatcactgggtcagttggtgttgccgtatttggagggatgatgtcttctggtgttatgtctggtagtagtgttgtcggttcagcagcaggagcggcttcaacatatgcaaatattttcttaattggcggtgtaatagttttagcagcgcttgtgatattcattgtcactaaaaaaatgatttacactcacggtgaaaaaattcaacaaaataaataggaataataaagtattggaggattcaaaatggcaaaaaaagtgattttagattgtgatccaggtcatgatgacgcattagcgttattaatggctattgcttcagagaagattgatttattagcagttactacatcagctgggaatcaacttccggaaaagacatatattaacgcgaagagattattaacactggcaaaaagtgaaggaatacctgttgctagaggcgcgaaaaagccgttgcgtcgtgaattgattattgcagatgatgttcatggtgaatctggtatagatggtgccgaactaccagaatctaaaattgcggatttggatatttcggcgaacgatctgatagcaaaaattttgagagaatcagatgagaagattactctgatcgctactggaccgttaacaaacgttgcgattttcttattatcacatcctgaactaaaagagaaaatcgaactgatttcctttatgggaggcgcatgttttggcgggaatatgacgcctcacgcggaatttaatatctatgtggaccctgaagcggcagatattgttgttaattcaggtgttccagttgctatgtttggtttagatgtgacattaaaagctcaattatttgaagacgatatcaaagaaattcgtaatattgggaataaagtagccacaacaatggctgatctattagattttttcaatttaacaactacacgaccattctgggctgatgaaacgcatgttgagggtatccatatgcatgatccatgtgctgtcgcttatgttattgatccggatatgtttactgtatatccaatgaatgtacaggtagagaccagtgatacattagcattaggcagtaccgtagttgattatgatgacgtctataagaaagaaaaaaatgttcaagttgcttttaatcttgatttagaaaaattcagagaattgacgatggatacgatcaagtatttttcataagataattactatcgaatacatgtatgtgaagacaattggagagaagtgcagaaatgaataagattacagtagtaggaagtgttaatttagatacaacgattcgtacagagaatttcccgaaaccgggtgaaacgattcattcaaaagaagtatttacaaacggtggtggaaaaggagctaatcaagcaattgctgcagccagaagcggtgctcttgtgaattttataggagccgtaggaaatgatgatggtggaaaaacgcttgtcgatttgcttgaccaagatggaatcaatacagtagggattgctcatttggatagcgtaagaacaggaagtgcttatgttaccgttgattatagtggagaaaatagtattgtaatctatggaggagccaaccaagaaatttctaatgaacatattttaaagaatcaagaaacgatttcttcgagtgattatgtaattgctcaactggaaaccaatctcgagagtattgaaagaagttttgaaattgctcaaaaaggctctgctgccacaattttaaatcctgctcctgcacttgaaatgttgcctgaaaaaattattcatgcgacagatattttaataccaaatgaaatagaattagagacaattattggtgttaaaattactagtgaaagtgatttagttagtgcagcaaataaaattcacgagttgggagttaaggttctcattgtcacattaggaagtaaaggagcattctactctatcgcagaaggtaaatcaggattggtacctgcttttgaagttcctgcagtggatacaactgctgcaggagatacattcattggtgcgtttgcatcaaaattatctcatgatttacaaaatatcgaagaagcaatcacgtatgcaagcaaagcggcctctttgacagtccaacggtatggtgctcaaccttctataccctatgaagcagagttagctatagaaatataaaaaagtagcgaaagaatgaaaaagcacttcccatttttttggggaagtgttttgcatgatcttaaaaggatttttcaaactatttaagaaactgttagttctaaagaaaaagtgttgaaatatctatcaataatcattcacttcgcaattggtagaatttaaaattagaaaacaaataaataaaaaaagcgttgacagcgctttttttatttgctatattgagcgtgtaaacagatagggtgcaactattaaattaggcacgacctaggaaagacactttccttgggtcgtttttttgttttttaaataaaaatttgaatgtttttcagagaggatcggtgcaactaatgaaagttgttaaaaagatcagtcataatgtgattttaattgatgatgagggaattgaaaaaatcgctatgggtaagggaattggattttctgctttcgttgatcaggtatttgatccagcactggcggataagttttttactttggataccaaagagaagaccaagatgtttagtgagatggccgctcaaatccctatcgaattcattgatttttccgaggagatcattcaatttatctcgaaaagaatctctacaccgttagattcaaacatttacattgccttgacggatcacatttattttgcgattcagcgtaagaaagaagacagtcaggtgacagcaatcatgttgccggaaatgaaattgctctatccggaagagtatgaaacggcgaatgaagtcgtggcgttaattaatcaacgctataacacagagttggaagcaaatgaaattggttttattaccatgcatattatcaatgcggaactaggcgaaagaaatagtttaaacagcttaaagatattagaaatgacaaagacgattcttgaggatttggaggaatcttatgattatcattttgataaagactcattaacctatcatcgtatgatgattcatatcaaatttttagtgaaacgtctgatttatcaagaagagtcaccaactgaaaacattggatttttcaccagtacctttaaagaaagtgaaccttatcagaccgcaacagcgatcaaaaaaatgatcgaagagaaatttcagttggatgtgcaggaaaacgaagttgtttatctggccattcatttagcgagaattcaataatcaagggcgtaactattcggtaggcgcaaccttttgatgcagagcgagcattcatttctgcgatcattaggttgcgtctatttttagtataaaaaagaaaggatgtaaagaatgggaaaagtaatctttaactcagatgattttggctacagccatggtgtgaattacggcatagttgatgcttatcaacgaggaatattaacttcaacgactttgatggcaaatatgccgggatttgaacatgcggtaaagctgaaaaaagaattaccagatttaggtgtgggtgttcatctgacactgacctgtgggaaacctttattggaaaatgtcgatagtttggtggagggcgatcaatttaagcaattatctttttatacaaagccctttgaaattgacaacgatcagctatatcaagagtggaatgctcaaattcaaaaggtttatcgagccggaattatcccaacccacttagatagtcaccatcatacgcacacctttgataataatcaggaagttgtcattgcattggctaaaaaatatgatctgccagttcgcgggaacttcgagagaaaatcagaggttcgacacgtcgattattttgaaccatattttgatgatgttggcgaaacaattgaggataaaaggcaaattgattgttcaatcgaacaatatttagaacagctactaacgcttttacgcgaagataaaaccatcgaaattatgtgtcacacagcatatcttgatcagcaattattagaggggtcaagttttgtttatccaagggtcaatcaggtggaatttctggtccattcagagtttgcattgcaggttaaaagggattgtttgattgagttggtaacttacaaggaaatttaaaatgaggaggagtttaaaatgtcgagtttaaaagcaaatgtacaaaaattaggtagagcaatgctacttccagtggcagcgatgcctttggccggattgatcatgcgtctttcagcagacgacatgttgaatattcctgttattggggctgcgggaaatgcagtatttggaaatttggatattctatttgccatcggagtaacgattggctttgctaagaccaaagacaaaggtattcctgcactaacaggatttctagcaattgcaacattgaaaaagggtttagaaattatgaatccggctgtcaatatggggatcttcggtgggataatctcagggcttatcgcagcttggacgtacaatcgtttcaaggaacaaaaattaccaatggtgttctcttactttgcaggggaaaagtttccgttgacgatggtgatgatattacagacagtcacctcggtggtgtttggctttttatggcccttcgcccaagccggaattgatagctttgcgcgcttattagttaatatgggggctttaggagtgggaatttttatgttccttaatcggctgctgattccttttggactccatcatgtactgaacacatacgtttactatgacttaggaagttacacctcgccaagtggcgaagtattccgtggtgagatgacacgctttatcaacggtgatccacaagcaggattatttttatcaggcttcttcgttatcatgatgtttggcgtccctgcaatttgttttgctatctatcgtgcggcattcaaagaaaacaaagagatggtcaaaggaatcatgggtagtggggcggcaacgtcatttatttccaatatcactgaaccagtcgaattcagttttatgtttctttctccaatgctttatgtcgtacatgcattatttgctgggcttgccggaatcgtgtgttacttgttgaatattcggattggttttacatttggtgcttgtatcgtggattatttaattaattttagaatcgcgaccaacgctattctcatcattccagtcggaatcgtatttttcgccctgtattactttactttctattacctaatcaagaaacgtaatattcaaacgttaggcagagaagcaactacagaatatggaattgaagcagtagaagaagaaaaggaactcggattagccagcaagaattatgagtatatggcaaagaaaatgctgcaggcctttggcggaaaagagaatgtttcagatgccttcagttgtaatacacgtttgagagttgaggttgaaaatccaacgatcgtcgatgaacaacgaatcaaacagttaggtgtcagcggtgtgatcaaaccaacagaaaaaaattatcaaattattattgggttagaggttacttacgtaatggctgaattcaataaattattggagcagtagaaaggaagagaataatgacaaagaaacaaattattacgattgccggcggaggcagtacttatacaccaggaatcattcaagcggtgctaaacaatgcagatcgtttaccgctttcagagattcgtttatacgatattgatgctcagagaaatgccgatatgtatttgattattcaatacatgttgaagaaagaaggatttaaggatgtggtcatttcatcaaccgaagatcctgaaacagcgtttaccggctgtgatttcattttttcacagattcgtgtcggtggtatgaagatgcgtgaaaaggatgaaaaaattcctttaagtcatggcttagtcggacaagaaacctgcggattaggcgggtttgcttatggtatgcgatcaatgaatggcctattagaaatcgttggctatgttcaaaagtatgcgcctgaagcatggattttaaattatacaaatccggaatcaattgtttcagaggctgttcgcagacagtatccaaaagcaaaaatgatcaatgcctgcgacatgacgatttcaatcgaagaaacaattgcagttaattacggctatgatcgaaaaaattggattccaacttattatggactgaatcattttggctggtatacctcgatttatgataaagatctgaagcgtgatgtggtgccggaaatcattgaaaaattaacgactcaggaaatggaagtagcggattttaatgctggagataaaacatggcaggaggctttcagcatgatgtctgttatcacaaaaaattttccgcaaaatattccgaataattatttagagtattatctatatccagatatggtcgtggaacatacggataaaaattacacgcgcgccaatatggtaatggaaggccgagaaaagaacacgaaggagatggcggaaaagattcgggaaggcgtaacagaagatatcctgaactttaactttggggagcacggccagtacatcgtagacatggcaacctctttactgaatgacgaacgccgccgttttatgctgattgtaccgaatcaaggagctattccgaatctgcgcgcagatgcggtagtggaagtgcctgcttatgtaggagcgacaggtgtagaaccgatttctctaagggaaccgatctctgatttccataaaggactgatggaggcacaagtagcagcagaaaaattattagttgatgcctattttgaaggttcttatcaaaaagcattgcaagcatttacgttgaatcaaacagtaccaaatgctcgcgtagcaaagaaaattttagatgaaatgattgaagccaataaagaatactggccagaattagtatagaggtgatgagaggatgctcttttttaaaatgaaaaatattctaaaatctgtagcaaatggacgagttcttcctttagaagcagttcaagatgaggttttctcttcaaaaatgatgggagagggctttgcaatcgctcaacatgatggccatgtctatgctccgattgaaggaattgttgagagcatttttccgacgctgcacgctattacaattgaatgtaagtccggtgaaaaacttttgatccatatgggattggacacggtggaactaaaggggctgcctttttcagtcaaagtaacaaagggacaaaaggtaaaagctggtactctattggcttcgatggatctacaccaaatagaaaaaagtggaaaagatgacacgatcatcgtggtctttccggatatgactaagggacagctgctaatcgaaaatcaaatcgtgacaatacaagatggactatttaaattttaaaccaagagcaaagactgggttttacgctcagtcttttcttgagcaaattattttgtgtttaggagaaattaatggctattttatatttattacccgctcttgggtgggggcttatgccgattattgcgaatttaacgaaggcgaagccaatcaatcaattgctgggaacttctacgacggcactcttactaggaattatctttaccgttattgttcagcctacgtatgattggcttagttttgcagcagcatttctctcaggctgtttctggtctgttggacaatatttgcaattcaattcctttcaattactgccagtgtctgaggcgatgcctatctcaaatggaactcaattaattgggacaacctttatcgcggcaattttttttaaagaatggaccaatcttactatgataatgattggaatgactggaattttgttaatcattttaggaattcgtttaacctcttatatagaagaacaggggaaaaagcaatcgaacacgataaaacgcaaagctatcactcttttattactatcctcagctgcattaacaatttatgtgacattgccgcaagctcttctagttagcggagcagtggtattatttccacagtcgatcgggatgtggttctcttcactatgcttaacgattattaaacgagaagaattcgcttggtcagaggttgtaaagaatttgggaactggggttgcttggagtatcgctaatttaagtttattttttgccatgccaatcattggagtagcaaaaagttttaccttttcccagatggcggtattgatttctatttatgcgggcatctttattttgaaggtacgaaagactaagaaggaattatgcatgatcagtgctggagcagcagtaattacactaggaatattcttgattggatcaatcaaataagtgaggaatctgttcaatgttaatttttagagtagatacaggagaagcagggataatcgaacgaattgacaaaaacccgggatgttttaggattattccgtattttatcaatcgtctaaaaaagagtgtactttaaaccgcgatgcaactcccccgcaggatatgtgacaacccttatctcaacttttacataaggcttttaatggcgtaatagcgctactaaaagccttattttttgtcattttccaaatatgcaagaaatctatactaattattgttatcatcaatcttttctagaaacatttgttgtattaatgaaataagatcaacccatctatcggaactattgatcgaatctagtagtttttcaaatttagctctactggattgtgaattgtgagatgaagaaattaagggatagaatcatagtgtttaatcaaaagagaatacgactattcatccagagccaacgatcctagttttaaaaagtgaccgaacctttttaatcgtacagcattttaccataaccttgctatactcatatttttcagatatgtaggctaatttgggacaagctaacgaacatataatagataaagtatcattgctattcgttaaaagcgactgtagttattattagtttacaattttgaattgaggctttatagttaaccaacaattaattaaataagaatggttggagtaactgagtaatctaaatatatagaaggaatgattatgtttatgaaaaaaaaggttttactagtcttgtcccttactttatcatctctggtgttccctgctatgataaaagcaaccgaagtcgagtcgccttctcatctaaacgaagtggtggggaaaaataagcttgcagatgacgaaccaattaattcttggatgcctgacgttaatttacaaaatgttcttgtctctattcttgggttaacaggtcctgaccagataaccaaaagtttattgtcttctagtgatatacatatagatgttactccagaagatacctcatttttaacggtgtcaaatcttactggattggaatacgctaacgaaataactatacaaagtagtggagaaaatattttttcttctgtaaattttctgaactatcccgaagtaatgaaaaagacgtcgttgtcctttgatggaaatctgaccactatttttccgaccggaattgattttgatctattgaaacactttgcgaatgtcgggtttgatcctcataacgtctatcaaccaaatgtggttatcaatttgaacgaggataattattctgagttctctattagttatgagcaagctgctttgtataacattaaccctgaaatgctaacaaatgttgggggcatagctatttatgattcaggtttagaactttattacaccgcttcattagaacctggagggatcaagttcaccttaaatccgtcttctgatcttgactactctaaacttgaagggaaaagtttctctaactcttcagaatctacggtttttccagacggtccttattcacaaataggcattactagctcgtctgattccaacatatctggctacatcaatctgtgcgtaactctaaattatgctaataaaaagcaactagccgaagatgtaatcgtacagtatgtggaccagtttaacaatgaaattcatccaacacaaacaatcagtggttatattggagacgcttacgacgcatctaccgatcaatacaaattaacaattgacggatattcgttggatcaagagcagctgccttctaatgctttgggaacgttgggagaacaacaacaaattgtcagatatatttataaaaaaatagaagcacctagtcaagaaacgtcaaaggtctttacacaatttattgacgaatcaggcaaagagctggcacctaagaaggaacagactggtttagttggtgaaacctattctacagaagcaatcgctatagatggatacacattagatcaagaaaaactgccaggaaatgcaaaaggatcgtacaccaatgaggacatcactgtcacctatgtgtacaagaaggtggaagcgcctagtcaggaaacgtcaaaggttattacacaatttattgatgaatcaggcaaagagatcgcacctaaaaaggaacagactggtctggtaggtgaaacctattctacagaagcaatcgctatagatggatacacattagatcaagaaaaactgccagataacgcaaaaggatcgtacaccaatgaagatatcaccgttacctatgtctataagaaagcaaattcaatatcaacagattcaatcgcatcaggtaagagcaaagggattgttgctacttcaaataaattggtggatcacaaactgcttcttaagacgggggagcagaagtctaagacactgttaattttaggaacagggttaatcctagttgcaataggtctgtttttctggagaagaagtagaaaaaaataaaataatgtgatcgaaaataaatccgaattgaaggatctgattcagaaaaaattccatcttagttatgatggaaccattccacattatcgttgaattcattggaactaaaaaatataatgtaaatgaggagtgctaaaaatatgatagatatgacttttgaagagcttttaaatgaaaactgtttttctgaagatgcagaaaaaagaaaacaagctgccgatttattggaacagcggtattgctgtgagattcgatgtgccgatatggataaaagtgtgcttttcgcacatcatgcacgtggctgcacgattgttgctgcaaaaatatgtgcaaatgtagtgatttttcagaatgttactattggctcaaatcagcggtttaataagattcttaatgagtgggagaatatcggaacccccattctatcagagaatgttatcgttgccgatggggctaagcttttaggtcctataataattggtgaaaacactgtaattggagccggtgccatcattacaaaggacattccggcaaatagcgttgcctatggagtgaatcaatacaaacctaaaaatccggattatgatcttgtgattaattcaaataatatatctggtgaagaaattatgcgaattgatgcggagcgagtgactgcttttgataaagcccataaagccagatgatagtaactctatgaaatatatttaggagttcacaaaaaattattcagagattcatgacatgttccccctataatagtataggggggagtttatttttcttctagaaaaatgaagctcagcctagaagaacggctagcttttgtagaaagagcgatacaaaaggcagtgaatgattacctgcgtggagaagtcaggcaactacaagattatcctactattgactattaacgtgctcttcgttagcattattattgttcgaaatcagtcaaaggaagaaataacaatagtaggagtagctaaaaatggataaaatttttgaactaaaaatcacctggcgagatgctgccctgctaatttgtgcgggcgcgatgatcctactgctagtactcggaatttctttttggtttttattcccttattttaataatcctaacgggctaaatatattatttagtttaaccttgctcgggatagctctaatgacaggagttattttcttttttgggtttcttatttatttcgcttctttgctgatctattcaggtatcaaggattctatttttgtattgaaatatggcggcatactttaccgtctggatcaaaaaggaattacttatcaagaaggctggctgttaaagaccaaagtatggtcagaaatttcggatgtcggattgtttaagcaagaatcgaagaaatctagtattgtatacaattaccaaataaagttttctgatgacttgcctcatacatttgatttgagaggaaagtatcctactaaagattttaatcaaaaggtagaagaattttggctgaactatatttacgaagaacccagcctcaaacgatgatctgttgttattaagaaagtgcttagcaaggaagaaggttgaatcttaaaatccttctcttgcggatttattacttggatggaaagagcatatagttagaaagagaccttcgtgaaactgagggaggagttaatatgaaagagtttgatgaaacagaaacctttgaatcttgctcaatttctaatattcaaaagatcgtgaacggtaaatgggaatatggtcattctatactttctaagtaaagagacattgcgctttggtgaattaagcaggaaattgccaaaggtgacacaagcgaatttaacaaaaaatctaaagctgttagaaagtcatgagatgattcgtcggaaagtctatccgcaggtgcctcctaaagtggagtattcgctaacaccaatgggtgagaaattcttgcctgtcatttaggaactggaaaaatttgcgaaagaatacgatcaaacaaaactagagcattagtgctttagtttttttattttcaaatctaccattgatttcattcatttctatcttacagggtagtatttctaaaaaataacgtactattcagatagatgagaaaagactatgctaatcatcagaaagattgaggggagtacgcttatgaaaaaaatgatattaaaagaatatggctcagtagatattatgaaaatggcagatgtagaaattcctagcccttctgcgcagcaactagtaattaaaaccgcggtaatcggtgtgaatgatcctgatattgtcattcgtcaagctggacctgcaccaactatgcctaaagatacatttcctccgcttcctcactcattggatgaagatttttctggtgtagtgactgcgattggagaagcggtaacgcgttttaaagtagtcgatcatgtcgttgttttttctaatatgaatacatatatggtatatatcttggatgcgcaactgctggagcatatgtttacgctacaggaacgaccgcgcagagcgactatataaaatcgttaggtgcagatgaaaccatcgtttatcaaacacaggatgttatacatctcgtatcggatatggatctaaaaaacgatcaattgactgcttattcttgaagcatattgacaatcttattttagatatgctacatttatacgaataaagacgaaggaatattcgtataaatgtgtgatactatcgcttgtggaatagtctcaaaagaaagtaaaacaaggttaaaagatctttgtgacaagaatgtgaactcgattggataactattgtttatcatatttaaaatagaatgaaatatgtagttttattatgaatacaactacaaatgtatatgcggtaaattgaatttaatgatgagtcaacaaaaaaattttaatgttaaagggtgattggatgtatgactttttttcaactgcactaccatggatagtattggctctaactttagcaattatcagttcaaaatatgtcctatttgatggtcaaggtaccaaaaatcaagaaaaaataggaaatgaagaggtgtacggtatgtgtcttggcttatgtgtaggaattgtattgagcacgacggttacaaccatccctttatcctatggtgccagttttggcatgctgataggaatgattattggtattgttttaaaaagacaatgaagaaaatgaactgaaaaagcgagtaagtgttgagagatttagaagttgatcgaatcataaggatgtgtacggggaattcttgtacacatccttatgatttttaagaacacgctgctattttcattttcctggtactggtctatttggctgaacggaagggatagagtaattcgctcgattttcgatttctctctctttttcctgttagtttattttcaatccgcacatcattcctttaaagcagacatatgttgaattcaggattttatctagtagtttaacatatgcggtctgcgaaaaaagaaacggccatctaccgagcattgttttcctgatcgtctttatcaggcgtttctccaacgtctcgttcgaacaccctaagccatttctgcagccaagtgatcttcaagccaaattcatgagcgttttctaaaatcgaaccgatctcgtaaatgattaacagtgctgtccagattaaggctacattgattggcagcgtgacccctacggttggcgcgattttatctaaggcagcggcgcaaataattgtggaaaaggtgatgaatttcgtaagtaaaccttgaagattaatcgatgatacccaggtatggcttctcaacgctttgacgtatccggtggtaaggtcgagtccaaccatggtcaaaaaaacgcccatgatcggcaaacttccgccgaatagataattgattattggaatttgtatcatatagattcctcactttctaaaataataattttttcaacgcagtatttaattttcaatgatcggatgtgatggcgaaaaaatttattcccgcggtggatcagacggcccttccttgtttttcttcctgatcctgtgaagccattgaagaactttgcttcgttctatcgtgtcttggttagatgatttttcagttaagggcaaagcaggttggttctgttcgtgtttctcacggtagcttggctgtggtagcgactctttttctactttgatcgctggtttatctaaagtttcaatcgtagttagttgtttaaaatagcgaccacgtggtgttgctgggagcacggaggattttgaagtcgccactgtcgtgggtttctcctgtttttccgcgacctcaaagcaacgaacttcttcacaggttgtttcctcaacgggctctccatcgtaacgaacacctctcgtctcatgttctggatcaaatatcagagtttctttataggtcaagaccttggcagtgactacagaatcaaatagttttacgccgttttgtgtacaaatgtctaagttcgtcaataattcgcaagcttctttgatctgtggcgccgttaagttgggatcaagatctctgtatttccaattgtgggttccgccatcgctttttccaaaggtggcaattaaatccttggtcattgttctgttcctttctttttcgtgtttaatctgcgtaggttgtttttatcaaggttcgccggtttcttttggtcggacaaatgacacaagggagcgagcaacagagacaaccttctcaccgaatttctttactggaaagactcttaattttaaagtccgccattccggtgccataaagtagtcttcaaaataataaaaaagacgtttcatggtacgtgtggctttagtgtgcataaaaacttcgcggacaagatcctttagaaagtgatcaaactccgccgctcctaattggcagcgaacttttaaggctaaaatatatttaatcgtgacactgctgttttgtgtttcatggtagaaattggtgattcgttgttcgagtgttttggcttttaagttgaataactgccgaaacgacagtgtttgtataacattcattgatgctcatcctttcattaatagtagaggatggcggtgatagcaccgctactcctcaaaagatttacttaaaaaataattgtttcaatcgtttcgacgtacttcgcggtttcgacagtgttgaagaggtctgcgccatctttatggcaaagtttgacgtcggtcatgcgttgcagtaatcctttgatctctgtgtcggtcttttgagtatcgggatcattgaagctccaggtatgattttttcctaagctgtttttaaaggttgcgacgagttttagcattttttctcttcctttctatgatttatttggtataacgtgattgactggttaggatcacgccgtctaattcactgccttcgactgacaaggctttcataatttctcccagttcaaggactttctcttcgctaggctcatccattacatttgtaaaggtgatcttcttagttttttctccgcctgcatcgatttctacttgtagtttattgccgatcgtttgaatcatggttgtttcctcctaaatttttttggttccggccggtgactaaaagataaacgatttctaaaaaaagtgcgaatcgcaaattgaccaaaagggggtcaatttgacctgtttttgggtaaaaagtgctgtttttgatgaaaaagcggtcaaattggaggtataatggtcaatttgcgattttacaaatggaatagaaatgtagtataataaaaagtttttataaaacggttacaatcatagctgtagctgagtttcccccttaagaaaagttgtaatcatcggtatattaagtcagctggtctaataggaatttcaaatattgttcaccaaaaaactctgcgaatgaatcaggacatgattttcgcagagttttttagttgaatgcgtacttactcacttgactgattatataattcggtgagtaatgctctgatccgatcataaacgtcagctgtttcagggatctggctttggatattttgaatgataaagaggtctctgtatctgtattcatcgtctagttcctgccacttcaaggaatctgttagtgctaatttggagataattgatttgcctatattgttttctaatagagacaatattacttcactgttatttgctttgatgatttgcgggtttagatgattagagtacagataggtctcgttgataagatacatcccagaatcatgctctctaagaatccaataatctgaatcaatattgccagctaaaacgagctcatctttataaacgaactccttttggatcaatggggaaacaatggatttttcaatcaagccgatatgggctttgtttccttcaacggcatcgatgacttcttgcgagttcataatcttgatttcaaaagctattaatggaaattcagcaatcagctgctccataattttgggtaataggtgtacggcggtggtgttggagcagccaaggatgcagtcagttttaaagtttttagaattttttgcttgggcaaatacattagatagggagtgtaacgcttcgacgactttagggtataaaaattcggcttgtttcgtaggcaggatcagctgctttccttttcgatcaaacagcttgaagcctagttctgcttctaatctttggatctgcacggagatggttggttgtgttttaaacatgagtttggctgcggtgctgaaatttctcgtttcatacacaataatgaacgttcgcaataattctaacaacggaatgacctcttttctattaataaaatttataacggatatgtaaaatcattattttacaaatagttcgctggtgtttattataggggtgtaaaaaatatatatcaagtgctatcaaataatttgatcatttagaaaggatatacctatgaataacacactaaagaattttctgaaggctataccaataccgatttgcggactgatcttaggaacggagtcactggggaatctattattttctgagggatttgaagggatcggaaatattttttgttatacaggtcttttgatgatccttgtatttcttttaaaaatcgtttttacctttaatgatacgatggctgcattgagaaatccgattattgcctctgtagctccgacatttacgatggcgttaatggtcgtttccgtatttttagacagattgtttcctaatcaaatcatgaataacgcgctatgggtaacggcgatcatattgcatctggctttgatgggctatttcattgccgtgcatattctgcctgtggaggtcacgcttgaatatgtttatcccagctggtttattacctttgttggaataggcgtcattccgaatacctcgaccgtgtttatcaaggaattagggcaggtcgctgtttggatcgctttagctttgtatttaattctgctaccaatcatcgttaaacgaatccttcataagaaaatatttgaggattcagcgattcctttgattacgattctgacagcgccaggctcactttgtttagctggttatctatctgtttgcaatcaagtctcttttccatttgttatcgggctgctgatcttatcccagttgatttatctttgcatcgtttttaatatgaaaagaatgctaaaggtcggcttctatccaagctatgcggcgttcacgtttcctttagttatctcagcgacggcgatcttcaaagcctccaaagtttttgaagagcttccgattttactgacagttactaaagcgttaagtattttagaaacgcttttagcaattctcgttgtttgctatgtcttagtgaagtatgtgattcatctatatgatcaaacaaaggtcctaaaggtaaatcgggaattttaaacagagtgaatcgctggtgctttcattactataggagttaaaataaataacagaatttttctcgcgatcgtttggaaatcagcggcgcaatccaataaaaggaaactactgatcatcaacgtatactaagacgtgtgattggatacacagaggatacgaaaaaaggaggggaactcaatgattctaattacaggcggtcaaggtcaattaggaacggagctgcgttatctactagatgaaaaagcggtggaatacgtggcggctggttctgatcagctggatgttaccgatagagtaaggacctaccagttcatcaccgaactgaagcctgccatcatttatcattgcgcagcctacaccgctgttgatagagcagaaggcgtcgacaaagaattaaacgaaaaaatcaatgtcggaggaacacgtaatgtagcagaagcagccaaggctgccggttctattttggtctatatcagtacggattacgtttttgatgggatgaaagaagctggatcgtatcaagaagaagagctgcccaaccctattaatgaatatggccgtacgaagtatctaggcgaaaaaatcgtcgaggaattactgactgagtattacattatccgcacctcatgggtatttggaagatttggagacaattttgtatccacgatgcgtaatttggcggagacacagacacgcctagccgtggtggaggatcagtttggacggcctacttggacacgtacattggccgaattcatgtatttcttgactgaacaggaagcgccctttggtatttatcagctatcgaatgaaaatagctgttcttggtatgagtttgccaaggaaatcctaaaagatacggatgtagagatcatcccagtagcatcaaaagattatccgcaaaaagcagcacgtccgcgaacgtcaatcatggatctaagtaaagcaaaggcactaggctttgagattccaacttggcaggaagccttatcaaatttcaagtgaacaaagattattcattggagatgtgattaatggaaaaagcgataattacaagcaaagagcgaataactgaaggtgggtgtaacgcctgtggatttgtgaaatgtatcacctacaccattcatttcgaagatggaagaagtgcggctctagacgcgttggatttgccgtcattggttcggaccatcgcgataaaaaatggctggagagaatgggtagaaataattgggataggtgaagagcgagtacatcttgtaaagaattcacaggtagtgtcgatggatgagaccgctcatgaaatctgctataaaaaagagtggcgacgcatcgaaagtccgaaacaatttgaagatacaaaacgcttatttgaacaagtaaatgagatattagagacgatcttcgatgttgagggctatttaataaagctaagaaaaaagaaatgtttaagcaattagaagggatgacaagaatggttggcataggggatacgatcactgcgaagaatgtccatggagaaataatctctggagaaatcaaaaaaatttacgcgaactctgttttagtattgagtcaaacaactccgcagcttgtctgtaagaaagagatatatcaaatgggtgattcgatagaagaaataagcgatccaatcatcgggaagacggaattcactatttcaaaatatcggagcgcgtaatgcagatgatccactgaagcgtgaaatcagtgataaatactagaaaaataaaaaaatggagtgaattcatatgaaacgtacaagtagaaaagttgccgtagtgggaacaggttttgtcgggacaagtatagcttattctatgatcaatcaaggaattatcaatgagttggtcttaatcgatgtcaatcaagaaaaggcagaaggagaagcgcttgacctgttagatggtatgtcctgggcacaagaaaatattaaagtgtgggccggcgattatacggactgtaaggatgctgatattgtcgttatcacagcaggtgttaatcaaaaacctggtcaaacacgcttggagctgattgatatcaatgccggaatcattaccagtgtcgtgaaagaagtcatggcatcaggctttgatggtattttagtaatcgcctcaaacccagtggatgttttgacctacgttgcttggcaagcatctggcctaccaagcagcagagtcgtaggaacaggaactactcttgataccaccagatttcgtaaagagctggccgaaaaattacaaattgatccaagaagtatccatggctatatcattggcgaacatggtgattcagaagtagctgtctggtcccataccacagttggcggaaaaccattgttggaatttatcgtaaagaacaatcggctaacagtagatgatctaaccacgatttctgatagtgtaaaaaacaccgcctatgaaatcataaacagaaaacaagcgactttttacggcatcgggatgagtgtcgcgagaatcgtgaaagccatcttgaataatgagcaagcggtgctgcctgtatctgcttatctcaatggagagtatggcgaaaaggatctatttactggagtgccatcagtcgtagatcaacacggtgtacgagaaatcatcgaactaaatatcgatccagaggaaagaaagaaattcgccgcatcaagcaagcagcttagagaggtcattcgttccttggatactaaaaagagtgaggaataagagtaaataatacaaaataccgctgaagcttgaatgtatagctgtagcattgcttgagcggtagatataatttttcataagtaaagggagcatgcaacgcaattatttgcgaagtatgctccctttatttagttgtttaatcttttttgtggtttcgatattctcgcaaccttctctacttgtttgcgtattttagagtaaaagaatatagatggcacacaaatttccatgctataatgtaggcgagaacagcctttcaatgtggaaacgtgtcctatctgaaaggctgtgagaacgatgcaaaaatacttaccaacaaacgatctactgttcaagaaatgttttacctctgaagattcccttcatatactaaaggcatttgtcaaagatttactcggtattgaattcaagcaactgaagccaaaagaaacgtatcacatcgatagttacaaaaagacttttgacaagttggatatcacccgcaccgaagtggatatcttagcgatcggtgaggatggcagtcacaccacgattgaatgtcagatacagccgcatatgtactttcgcgaacgaaccattttttatctggcggaagcattttgcagtcccttcggaaatttagaaaccgctaattttattaaaggaaacaatttttccgcattacgtcccgcatatggaatcaatattatcgattttcacttgtttgacaaaaaacagcccgctctgcaacgcttccgtttactaaatgaagaaagttcggttccctttctcggaaccactggcaaagagctgctgatcgcctgtttccttagtttaaaaaacgaaacaatcgaacaacaaagcgctgcttatcattgacaatactttttcaaaagcggtacagtccacgctgacgccccagattacatcaaagaagcgaaacaaaaaatagactattacaaacttggaagggaggaaaaagagatgattatgaaaatcgataaatccaaagcaataaacgatgcagtcatctcctctgttcgactagagagtgagaggatagggcgtgaacgtgagaaatatttgattgcgcgtaacctcatcgaaatgaaaataccgcttgaacaggttgtggaagctactggcttggagcttgatacggttaagcaactgcaaactcaacatggtgattgatactttgtctactattcctgaaaggaaaagatgtcaatgggaattgataaaaaaactaaagtcattaacgacgctgtcgccgccatctctcaactgtatggaggaacagccggacttggacaagcaaaagaagaggcacttagagaaaaatacgaacaagcatatgaacaagcatatgaacgagcatacaaggaggcatatgcagaaggggtagaaatcggaagtaggaaagtgaaaattaaggctgcgacatacctattaacgaaagattattccatcgaagatatttctgagatgaccaaactagatgttgatactgttaaagagttagcagttaagaagtaatttaaaaagtgatcataatagctgattaaagcgatgagatacttgattgttggtatcctgaaaaaattttacaaatcgtatccaaaaagtattgatttaaagacaaaaagagtgagtcaaacacccgtagatgtttggctcactcttagtcgtttcagctagggggctgaaggatttaaggttgtttgccgatataggctaagataccaccatcaacgtatagtacatgtccgttaacaaagtcagaagcttcagaagctagaaagactgctgggcctgctagatcggtggtagtaccccagcgactcgcaggagttcttcctaaaatgaagttattgaatggatggccttcctcacgtaatggagctgtttgaggtgtttcgatataaccagggccgatgccgttacattgaatgttgtattgcccatattcagaggcaatgtttttcgttaacatttttagtccgccttttgcagcagcgtaagcactaacagtttcacgcccaagctcgctcatcatggaacagatattgatgattttcccagctttcttttcaatcatgtctggcaggactgctttagatacaatgaatggggcatttaagtcaacatcaatgacttggcggaagtcttcagccgccatctcaaccattggaatccgtttgatgatcccggcattatttaccaaaatatcaaccgaaccaacgtcttctttgattttagcaaccatcgcttggacctgttcttcgtcggttacatcgcacacatagcctgtggccttgattccagcttttttatagttctcatttccttgatccactgattcctgattgatactattaaaaacaatggtcgctcctgcagctgccaatgaactggcaatctcaaaaccaatcccatatacgccgcctgtaaccaaagctaccttgccgtccaatcgaaaattatccatactaaatgtcatgataaaactcctttttaatttatttttttgttgtagttttatttcagttgatccatcggtaccatatccatatcagtgtaagtaatgttttccccgcacatcgcccagataaaggaataattacttgttcctactcctgaatgaatcgaccagcttggtgaaatagccgcttgttcattcttcatcactaaatgcttggtttcatctggcttgcccatcatatggaaaatgcgcgtatcctgttccatatcaaagtagacataagcttccatgcgacgttcatgggtgtgacacggcatcgtattccaagaactgccgggctctaaaatggtgtagcccatttgcagctgacagctttcgcagacattcgggtgaatgtattgataaattttgcgttcatttaaggtcaaaggttcgccagtttccatcggtttgatttgatcgatactgattttcacgttgggatatttatgatgcgctggcacagaactaacgtaaaacttcgctggattgtccgcgtcttgtgaagagaagatgacttgacgtgtttctttcccaatgtaatagccatcttgttttttcatttcttctttttttccgtcaatttcaataaatccaggcccgccaatattgataactcctaactcgcggcgttctagaaaataatccacacctagttctttagacagaacgatttctaagggctcttttgtaggggcaacaccgccgaaaatcatccggtcgttgtgggtataagttaaggtgatggttcccggctcaaaaactttttccactaaaaattcatctcttaattgttctgttgaataatgacgaatattttcggggctatgggtgtagcgtgtttccatgttttgcattgctgaattcctccttgtgttatgaaccaactgtttttatctaatagtattttttcgtagcttgtaacttcttatcgcctaatttttcctgatccaagggctaaaaatgcttctacctcttcttgactaaactgattgcagtcgccatgaacggtatgcttcaaggctgaggccgctgtcgcgaaatcaaccaccttttgatacgaatccttcattaaaaggccgtgaagaataccaccagcaaacgcgtctccgccgccgacccgatcaataatcggatcgattagatggcattgcgattcataataggcaccatcagcccataatgttccagtcagttcattcacactggcggaatggactgtccgttttgtagaataaaaaacagaaatattcggataggcttcctgcattttttgatagtaataaattgtttcttctttatctgactcaccagtataaggggggatgcctagaaaatgctgggcatccaagctgcctgccgaacaataatctacatagggtaaaatagctcggattgattttcccgcttcttccggtgtccataattttccgcggtaattcacgtcaaaactgatcttgcagcccgcttttttagccgctttcaaaagtgttacggtcagttctcgccagctagctgaaagagcaggggtgatgccagataaatggaaaatatctgtgttctggaataattcctccagtgtccattcaagcttttccatcacagcaaagcttgagcccgcacgatcatagaccacacttgcgccacgttcgccgacgccagcctcaagataataggttccaagtctagggcctcccatcagaagctgagaggtatcaacgccgtagcgattcagatgctttttcacagcatgtccaagttcgttcgtgggtaccttactggcaaaaaccgcgtgatgcccatagtttgctaaggaaattgcgacgttggcttcaccaccgccataatgagcagaaaaatcttcagcctgtgcgagtcgtgtaccagctgtggttgaaagccgcagcatgatttcccctaaagtaacaacctttcccatgattagcctcctttatgagtttattttcaagtttctatttaacgattgaatgtgagattagtgtccttttatttcatggaacttcgtcatgtattgggcagctacctcggttactttttcaaaatcgccagttgccgcaggagctaacagattaccgccaacaccgaccgtaatgactccagcttcaaaccaatcagccatattgtctaggctgactccgccagttggcataatattcaactgaggcagaggcgctttaaaggctggaataatcgatggaccgtatgcacttcctgggaagagcttgatgatgtccacgccgctcttcagcgcctgtttcatctcggtaatcgtcatgcaaccgggtaaatatggaatttgatagaggttgcaaatttctgctgtttcttgatcaaacgtagggctgacaatataatcagcgccagccataattgccaatcgggcagtcacggcatctagcacagtgccagcaccaacaactacttctggtgaatcctgataggcctcagatagttctcggattacttcgtctgcctgtggaacagtaaaggttagttcgagcccatgcatgccgccttttacaatcgcttgactagcctgtaatgcttcttcctttgttttcctgcggacgaccgcaataacgccagccttttctaatcgctgtagaatctcaatctttttcacatttaccactcttttcttatttggaaaccatattttattataaggaaatttatagtttcattatacatggaataggagaaattgcaaacggtttaatgaagaaaattgtttttctttctattttgtttgaagaaagagcacaccagctttcaaatagaaaaaagctgattggacagatacgtgtccaatcagctaagcaatctttttttatttgtttaacagctgttccagctcttttttggtttggagaattgtttgaataatcaattgttttttctcatcgtttagtcggtatttaggcatactgacactaaaagcaccgatcgcttttccatctttttctaaggaagccccaacacaaaagatatctaattcgacttcttcatcgtcaaaggcaatccctgaatgccggatttccttcagctcttttgccaatctcagaggattggtgatcgtattttctgtatgaggaaccagcgtatgctctgccagatattgatcaaattcctcctgagaaaaggttgctaggacagcctttcccatagcagaactgtataacggacgtgtgatcccaatctttgacgacatgcgaatcgtttggtacttcgcttccagcttgtttatgtagagaatttcattatcgctcaaaattcctaaatgaatggtttcgtcaatcgtttgctggagcttttctagatagggaagagtgatttctgccagatctatttgttcaagccgttggttggcgtagcgaattaattttgaacctagccgataggttttatgctcacttttttttacatagccaattaggactagggtgtctagtattttaatagttgttgaaggtgtcatctttgtagcagctgtaatttcctgaagggattgatcaggctcctctgctaaaaaatccatgattttggctgcttttatgagtaccgttccgtagggttttgcttctgacatctctctcatcctttctatataggaaattatatacgataaataagaaaaatcaactgctcaagtaaagcaaaaagaccacccttgtgaaaatgggcggtccttaatacaaatttgcttaattttaaggcagtgtaatcgcttcttgcgtgtcactatcaaaaaagtgactcttatttaaatcaaaggctaaatcaattttctcacctggttgatggaaatcgcgggcatcaacacgtgagacaaattctgtatcgccaatttttgaataaagcatggtttctgcaccaagtaattcggaaacgacaatctctgatcttacagtagcttctggtgtcgcatctatgacaatttgctcggtatgaatatcttcaggccgaatgccaaaaatcatttctttgccttcatagcccttttcgactaagactttatttttcccttgcggaattcttaagttcagaccatgctcattggtaatacagccatttgatagtctaaccgtgaagaagttcatcgccggagagccaataaagccagctacaaagacattcttaggcgtattgtagacttcttgcggggagcctatttgttggataaagccatccttcatgatgacgattcgatccgccatagtcatggcttcagtctggtcatgggtaacataaatggtggtagtatttaagcgttgatgaagtttagcgatctctgctcgcatggcgactctcagcttggcatcaagattggataaaggttcatccatcagaaagacttgagcatctctgacaattgctcgtcctagggcaacacgctgtctttgtccaccagataaagcagaaggttttctgtgaagatactcagtcaagcccaaaatctcagcagcattttcaactcgattttttatgtcgtttttatcaaattttcgcaacttaagcccgaaagccatgttgtcaaagactgtcatatgcggatagagtgcgtagttttggaaaaccatcgcaatatctctgtccttgggcgcaacatcgttcatcagtttgccgtctatcagaaattcaccttcagaaatatcctctaatccagcgatcattcttaaggtagtagatttcccgcaacctgatggtccaacgaatacaataaattcgcgatccttgatatgtaaattaaaatccgtgaccgagtaattctcattgttctcatatttcttgtggataccatttaaagcgatttcaaccatgttttgttccctcctcgatttgttactcaaactatacatgattgcgctttcttatctcaacgtgaatgtacacaagaaaaatgccaatttttgcatagtttgccgaaatcctaggaatgatgaaaattcaagataagaagataaccaagaaataaagcattcgcttctttcaaattaagtcctgtttcagaataaaatttttcaattttatatagcagcgtgttgcgatgcatatacaaatcttttgccgtcgagctgagatttcctagattgttccaaagtgccggaataatctcacacatctcacttttcttaagccacattgtataaagctccgataaaagcacgctggcctttatgttctcgtttgaatagaaggacatcgccacattggagatatctttgcattttaagtttgtcgtcgtttcccaaaagactgtttgctcttcagaaaaaaattcagcaaatttatgttggctagaatgaaaggaccccacaaataatcttgtcgaaacattgaaatctgtatcaagagctagaaacaagccatcaagttcattggtactcaaatagtcctcagattctttttcaacgagaaaggcggtagtttcggttgtaaaaaagaagtctacgatattcggaaaaatttgtttgatttcttctatccaaagttcttttagcgggaaatcagaggtgctaagttttatttgaatcactcggtaatggccttcttggtcaattgatttgttttcgaataaaaatgaataccaagaatgtttttctttatcaattttatttttaccaaagagaagagttaagagttcttcttcacgggcagttaattctttcttcggtatccgaatgaatccagcttctacgggaatagctatatcatcaggactatgatcgtttgtggtctgcaatgaagaggaggggaacaatgatttgatttcttgatagttcataaaagcagctcctttataataaatgatcggcagcgttcaagctttataattcgtcatttatcttaagagtagaaggtatattttgaaaagtcaatttcaatctgtaggttctaaaagtaatgtaggcagtcttttacctaatgatttctaaaaggaaaagcatgaaaaagtttcgggtgttcgttctttttaattttgttactggtctttttatgaaaaaggatgggtaaaacaaatgttggtgaactacgctagtaaccgcgcatggagcaaaagacatcggcgttagtttggatattcaaatttagagtcagtatccatatcagaattattctgattctagcaacactgatctatatgttgattgagagaacactataagaagaatcatcgtgtaacttgcaacggttttttttgtggtcattttgggttagaaatagcgattatcttcatgtaattctatagtttagagaagtttagaacgcataagaattcaggacaaataaaaaaattaaaaaaaagaatagtattcaaaaagtaataattttcaacttgatttttcatattttataatccgttttcaaaatttttgactggttctttgttgattatttttagaagttatctgagaaatctcgttttctgttttagcaatcataataagtcgacttaaataagaatgacaagttactaataatgtttctttgtcaaagcaagctggatttccatttttcttcattttgtttcataattatgatgactaagaaaacggatactcggtgagtggaaaggaagcgaaatacatggaaatgaagcagctgacaaggagacaactttttacagtcaaaaaaagagaaaacctagagaaaaaagtgtgcaaattctgggaagagaccggaaatgtagatctagtaatagaatacattatcgcgatcatcttaagaaatgcattggtggttagtgatttttcactaccttgcaaagaccttgttcgtgagctgctttttcatgctgagccgagtgaaacgcttaaaaagttttgtccattcttgaaggattatgtggaagaatctgaatggatcacggttattaaacgtctgtttaaaactgaaacaaattattataaagcaaccaaaaagatccgaatctatgagagctacttgaaaaacaaagggactgctgaaattactgaaaaatacgatagctttacacttatctcttactttgaagatgaaagtgggaagaaacatacctggaaattgagagacgttgatccaagtaatactcttgaagagacgaagcgcatgcttggcattctgacaaaaatgacaatttttaaaaagggagatatacgccaatttgcaaaattcttagattgcgaatgccgagggaccactacgctttatagtacacgagcacctaaagagcaagaagcaaaagaagttgttgttgaacctcaaaaaataaaagcggttacagatgcagagtcagatctattgaagggctacgaccttcatttgctgaataaggaacagctgattacattaatcaaaagcttactaaaggaagcagaagcgataatgcatgaagcggagctcggtgaggtaagtgaagaagattttgacatgttaccttacaataaagtaatctcgcagaaaacgagactaaatgatcgaattgttccggatacttctgataaagagcggagatcatctaagtctaatcaatctgaaccagaaaaaggcgaagaaatatcggctttagtggcagctgaagccaagatggaaccatctctcaaaaagcctactgaaaaaccaccaaaatccaacagcgcacccaaaaagaagtatacaaaaacggagcgggcgctactgaaaagatttagcaaggtatagaagaaatttttatatccttttttcaagggttatttgtcatggacatagcgatttcagttatggtaataaagattgattgtattgcttttgggattttaaggagaagtgtgtcaaaaaaagaactgcaaatgaagagtcgaatattcattggataatccagcatgaaaatctgacagatcctgagattacagcttttgctgattaaagaattaggcgactgattttcctacacataaagattcacgaaattttagataaatattaaagatgcggaattagctatgataaggcaattccgcatttttttattttcacttaactttatttttaaaaagaactttacaatttcagtgataccggttacaatcaacttgtacctacttgtacacgctagtccaaacttgtacattgatgattacacttgtacattcttgtttctagttgtacaaatgaatgcaggaggtgatcaaatgatcattaatagagaagtttcaaagccggtttatcttcaggtagcagattatttgcggaataatatttattctgaagaatggggaaagggggaacagataccgtcagaaaaccagataatgaagtctctggaagtaagtcgaggcaccgtgaaaaaagcagttaacatgttggttgaagagggattgttataccagattcaaggaaagggaacctatgttacagaagacaacatctcttattcattgggtaaaggtcttctatcctttgcagaatcattggagggacagaaattagcttatgaaacgaaggtcatcacttctgaatttcgtaaggcaacaaaagagatcgcttcaaggttgaagattgctgttggtgaagagtatttgtacatgaaacggattcggtttgttgaaggggaaaaagtcatgttgattgaaaataggatcaacagtcgcttgtgcccaggtgttgaggaacatgactttaataaagaaagcttatttaaagtgatggaagaaatcagcggcaaacggattggttactctgaaagtagatacgcagccagagtagtaggtgagaagcgtggaaaagaattagaagtttcccctgattctccagtattgcatctggaacaattagtctatttagaaggaggtttaccagtagaattcggaaatgtatggctgaaagcgaacaagtactaccttggaacggtacttcaaagggaggaaatgtagcatatgccgttagtaaatggttacagattattagacattattaaagaaagaaaagtaattgcgggagcgttcaatacgaccaatctcgaaacaactgttggaattttaaaagcgattgaagaaagtgggattccgacattcattcaagttgccccaaccaatatcacgttagcgggctatgaatatattgtcgatatggtttctcgctatgcagagaatatggatactcctgtggctctgcatttagatcacggaaagaagtttgaggatgtaaaaatggccacacgtgctgggtttacttcggtgatgattgatggtgcctcgtatgattttgaggagaacattgcttttactaagaaggcggttgattttgctaaaggatatggaattccggtcgaagcagaattaggcgccatactaggaaaagaagacgatcatgttagcgaagccgattcgaaaacaaatcctgcccaagtcaaagagttcgtggaacgaactgggtgcgatatgctggctgtttcagtaggtaatgttcatggattagaggatgaaccgcgtattgattttgacttattaaaaaaaatcaacgaagtttcaccagtgcctttagttattcatggcggatcggggattccagatgaacacatccaacgaatggtagcatttaatgttgctaaaataaatattgccagtgacttacgtcaaagctatatcaagagcgttggaaaagcctatgaagaaaacaataatgaagcaaatttgatcaaagtattgcaaaatgccgaggatgctgtttttgagactgtttatgccaaaattttgagtatgaacgctgccactgtggaggtttaagaatgactgaatcattaacaaatatagaatcattgaccaatgaaaagaatatctttgtgaatatggaagtggcggattttcctgaactcatccataaaatcgctcagcccttaattgaagatcaggacgtggtcgttgagttccctacacaggttatcaaacgagaagaaggattctcaacaggcttgcctacagaaccgattggtgtggctatccctcacacagatgcaaaatatgtgaagaataatcgcgtgacgattgctacgttaaagaatccaatcaaaatggaagtgatgggtggcatggatgacgagaaaatcgacgtatcgattgttttcttattagcattaggacaatcaaacaagcaattaaacattttaaagaaattaatgggtattttgccggatgctgagttattgaaaaaaatcaagaacggcactaaagaagaaatctatcaacttgcaaaagatgaaattggactttagaaataggaggaagaaaaatggctaaaaatttattatttgtatgtgcgacgggaattgcgacttcaacagcggtaacggagaaggtaatggagtttttaaaagaaaagaatatgacagatgtgaattattcacaaaccaatgttgcttctgttcaacaaaattctgacgaagctgatttaattgtctcaacaactaaaattccttatgaattagaaacgcccgtcatcaatggcttaccattaatcacaggcatcaacgaagaaaaagtattgaacgcaatttatgagcagctaaaaggagaataatatggagaatatgacaaaaacattatatgacgttgtacagtatgttctaggttttggaccaactgttatgttgccattagtattgtttgtcttagcgttgatcttcaaaataaaaccggcaaaagcgctccgctcttctctcacagtcgggatcggttttgtcgggatttatgcaatttttgatattttaacaaataatgtaggccccgcagcgcaagccatggtagaacaaacggggatcaatcttccagtagttgacttaggttggccgcctttatcagcaattacatggggatcaccgatcgcaccatttgttattccaatgacgatgctcatcaacattatcatgttggcaattaaccaaacaaaaacagtcgatgtcgacatgtggaattactggcattttgcacttgcagggacacttgtttattatagcacaggtagtttctggttgggaattctagcctcagctttaatcgctattattgtcttaaaaatggcagactgggcagcaccattaggggaagaatactttggtttagaaggaatttctctgccaactgtttcttcgattacctttttcccaattggactaattggaaataaaattattgatatgattccgggaatccgaaaaatcgatatcaatcctgtcagtattcaaaaacgttttggtatttttggtgaaccaatgatggtaggaacgattttaggcttactattaggtgtggcagctagatacgaccttaaaggaattctgacaatggggatcagtatcggagcagtgatgtttatcctgccaagaatggttcgtattttgatggaaggattgttgccgatttcagaagcgatcaaaaaattcttgaataatcgctatccggatcgtgatgatctttacatcggactggatatcgcagtagctgtcggaaatccagcgattatctctacagcgttgctattaacaccaatcgcagttattttggcatttgttttaccaggaaatacggtgttacctttaggtgatttggcgaatttagcggtaatggcttcaatggtggttttgtccactaaaggaaatgtctttagagcagtattgatcgccattccgatcatgattggggatctatatattgcctcagcggttgctccatttattacaggcatggctaaggatgtaaatttcagtttcccagaaggatcaagcggactggtatcaagcttcttagatggcggaaatcctttaagatattggattttacagatctttaatggcaatctcattgcgttgattctgattcctgtgataggaatagtcttgttctggatttacaaagtgaccttcaagcaaactcatttaatcgatgagacttctgcaccagaaggggagtcattgaatggctaaggagctttccattacaattgatatcggaacgacgaattcgaaagtgtcactttttgaaatagctagtgggaaattagttttccgtgagagctttcaaacaaccaagaaagtcgatgaatatggagaactgttcgacttgtctgaaatctgggatcgattgttggaaatcttaatcaaaattgtttctgctaattctggaaatattgattcaatcaatatttccagtgttggcgaggctggagttttagttgataccgatggacaggtagtgacacccttgattgcctggtatgataaacgggcggcaagctatgtttctgagttgacgcaagaacaaaagcaaacgatttaccagattactggcttaccagctcattcgaattacagcattccgaaaattaaatggttgatagatcggcttgaattgattggtcaaaagtatacttggctaaatgtgcctgatttaattagctattttttaacgaatcagatgaagacagaattttcgatggcaagtcgtacgatgtgctttgatttgcaaaaacgtgagtggtcaactgagattttggaaatgtttgatttacagaaattgatcagattcccgccagttattgaatcaggtggaatcatcggatatacgacaacgagcacgataagtgaattgaacaaggagaacatctctgtaagaatcgcagggcacgatcatatggtcggtgcgctaggaatcaaccttcatgataaagatttattgaattctacaggaacgaccgaaggattacttctgattgatgatcatccttttttagaaaacaaatcgtttcaggaatctttgtcaaatggcatttttactaatcctaactattacacgttgttttcctcgatgccaacgggcggcaacgcttttgaatggtatcaaaaattcttttcaatcgatcaaaaggagtttgaacaagattgtcggaaattgtatcaacgatatttattgaatcaaatttctttgaaggatccagtgatcttgattccccatttaaatggatcgggagcaccatttaaaagtggaaaatcccgtgggctaatgtatggtattagtttggagacacgccgagaggatgttttgctgggaattattttaggtctctgtcttgaaatgaaatatgtagcaacctgttttccactagaacaagtgagacgtgttgttgctatcggacctgttgtaaagaatcctttatgggtccagttgaaggcagatgcgttaaataaggatatatctgttgtaaaaattgaagaggcggtttctttcggggcattgaaggcgacttacaaagattttgattatgaactggattatcaagttgtgtcggcaaatccaaatcaagtacaagcatttgatcaattattagataagtattcttatttgtatgaatcgaaacgttttctggtcgatgataattttcctcaaagttattttgatagtagagacattcagaatcgatacagtgatacaaaggaatttttctttagctaaaaaaaggagctcgttgagttcctttttttagctattttgtttcaattcatatcaaggaatttcgtaatgaatattcacggcactataattttgagataatcaaatggtacgcctactgttatggtcaacagtaaaaaaagagattttttaaactattcatagttgtcattaattgaagcttgctttagcaacgataattgcatgatcgttcctgcaacttttttgttaccaatggcgcgaacttttgtggaagatgctaaaaaactggataaataagtaatggtcatgattatctggatcgcagggattgacttgtacaattaattgcatgattgatcctgcagaaagttcggctccaagctctcttctttcattatatgattcaggtagtaagagagaaagaagggcacacaacatgcaattagtaaatggttttaagttgatggattatgcaaaagaaaatggtttagtcttaactgcattcaacacaaccaattatgagcttacggcaggaatcattcgcggctatcaggaaaaaggcttaggaggatacattgctatttcatcgagtaatttgaagctttctaatccaaagattatcgctgacatggttaaatcagcaatgaaagaagcatctgttccagttgccttgcatttggatcatggaaagagctttgaagacgtgaaggcgtgtattgaagcgggattcacttcgattatggtagacgcgtcacacctgccatttgaagaaaatattgaagaagttcgacgaacggttgagtattgtcatttttatggaataccggtggaagcggagctaggagcgatcggtggtaaagaagatgatcatatttctgaagaagatgcgaaaaccaatcctgaagatgtcaaagagtttgttgagcggaccagctgtgatttgttggcggtatcgattggaaatgtgcatgggatggatctgactccgaatctagattttccattgttagagaaaattgcggcacgatcatcggttccgttagtcttgcatggtggttcgggaattccttttgatcaagttagaagagcgaagcagcaaaatttgattaaagtaaattatggttccgatcttcgtcaggcctttatccgaacctttggtcaagcctatgaaagaaatcataatgaatttgatattatgtcgctttcaaaactggcaatcgacaacgtcgaagatcgagtaaaagccatcatcaccgaggtaaatgagaaataaggttaaaacagggagggagataacgtgttaacaaagagacaaaaagaaatgattcaagaatttgaacgacacagcccctcttttttaactgctgaccattttgtagaaaaatttcaagtaagcatgcgtacagtgcaatcagatataaaaaaaatacgagagcatctagcgactacccgatatgctgagctgatctcagtggcatctaagggcagtcagttgatcatcaaggattatacggcttttcaagtaaataatcagcaaaaagagatcataagtgaatcaaatcaatcagatcgagtaagaaaattgtgtgtattactgttgaatcagaaaaggccgatcaaccgtcaaaaaattcttgatcagctatttattgcttcgtcaacgttgaatatggatttaaaggaagcagacaagctgttgagtaattatcagttgagtgtggagcgaaaacgaaattcagggatttttatcagtggaaatgaatacgataaaagaaaatgcttattaaaattgggtcatctggatatccatcagggtcaaagcaatatggaaaccgaagaatccttccggcaagagattgagatggttttagtcagtgttcttttaaagcatcattttcatatttccgaaacgcttttccaaaacttgatcgtccatatcgaaatggcgatcaaacgaatgaaaagcggcttctatatcggttcagatgaatttggaggaatcacggactttgactcagagatggaggtttcgacagaaatattccagcgtttggctgaacgttcctatttcaaggtttcgcaagaagaaattcttaatctggcgatctatatcaaaggtaaaagtgattatgaaaatgacgactatatctctgaagaggtcaataccttcattcttcatgcgttgaaggaaatcaatgaaaaatttgatattgattttcgtcaagaaattgatttacgaatttcattagctttacacctgatgccattactcacaagaattgaatataatattcaaaatgaaaataaattactggatcaaatcaagcaatccttcccattaggatttgatattgctgcctatatgtgtatgctgctgcaaaatacgatcgacaagaaaattgaagagggcgagattgcttatctggcaatttacttcaatcaatatctagccaaatacaacgatatttccggcaagaagcggattttgatcatcactagcttaaaacgcagtgaaagtattcttctgaggcagcgcttcgctacctggttctcaaatgaaattacgatattgactttagtgaacacccatgaggttggatttctggatattgaggattatgatgtcatttttacgacggagcaaactgaattgactgataaaatgggggcgattttgatcagctttttccctagcgaacaagaatactccaaaatcaaattagccatcgatggcttcaatgacaaatttgaaatcgtcaatctgtttgatgaagcactttttcgatatggtcattttaccaacaagaaggaagtcttggataagatttgttctatctctgtttcaaaagttggcgataaggtttttcaattaagagaggcagttgaactaagggaagagatcggcagcagttattttggaaatggtattgcattgccccatccgatcaatccaatccttgcggaaacgtttgtgtcagtcattttactgaagaatgaacttgattgggattcagatgggaacaaggtgcatttggtcatgttagttgcgattgaaaaaaataatgccaaggtgtttcaattatggaactatctagcaaaaatcattcaggaaaaaggatttgttgatcgcgtcatcaaaaatccgacttttgagaatttccgagaaaatctttctcagctcttggatgaatacatttagtagagactaggatatccgttctgcttttgcaggttgcgacaaaagaaagtgaaatctttggttacaagagttgttgtaccagcgatttagcagaatgatctacgtggtgaaactcaatttttattttgaaaaaataagtacattagacatgaagtaggaggatgaacatgaaatatatttttgtgtcacatggtgatctcgcaaagagtattttagaaagtgcccagatgatcgttggggaacagacagaggttaaggcttttggcttgtacccaaaggatgatatcggcggtctgaaggctaaagtcaaacaagcaattgaagaatttggcggcggaggggatattatttgtttcaccgatctattcagcggcagtccatttaatgcggtggttggattgatgggcgagtatccggttcgtcacattaccggaatgaacttgccgatggtgctagaagcttttatggctagaatgaatgaaacgaattcagccgaggatatctgtgccaagctgctacgtgaagctcctgccacatttatcgatgtcaataattatttagacgtaaatttagaagattaatacaaaaaactgaaaaaaaggagcgagtaatatgaaaaacattgtttttgcgcgagtagatgatcgattgattcatggggaggtggttacagcttggacgccttcatacagtattaaccatattatcattattgatgacattgtagccagcgaccctttccaaaaaagaatattgaaagcgttagcaccgacgaaggtcagagtggatgcctttacgactgaagagggaatcgaagagctgaaaaaaccatttaatgaaaaagaacgtgttttactcttaaccaagacaccaatcacgtatgccaaattggttgaaggcgggattgatttgccgcaagtaaatcttggcggaatggggattcgcgatgaacgaaaaccatttatcaaaaatgtagcatgtgatgaagcggaggtggaagcgatccgtcagatggttgataagggggtccatgttttctatcaattagtacctgaacaacggttaattgagattacaaatttattataaaatatcagtccaacttttcgcaggattaaaatgcgacgaagaaaaaacaaactgagtaaattaacttgtcgagaagtatagttggatgatatacggcatgaaaatcgaacctatttttgaaaaaatagatacattattaagaataaggatgtcagttcaactattcgcagaattaaaatgcgacgaaaaaaaacaaactgagtaaattaacttgtccggaagtttagttggatgatatacggcatgaaaatcgaacctattttcgaaaaaaatagatacattattaagaataaggatgtcagtccaacttttcgcaggattaaaatgcaacgaagaaaaaacaaactgagtaaattaacttgtcgagaagtttagttggatgatatacggcatgaaaatcgaacctatttttgaaaaaaatagatacattattaagaataaggaggaaaaatgtatgtcagtttttcaagcttttctatgtggggttgtttattttctagcgataggaaatcttccctttgttggattatggtcattacaaagaccattggtatgcggacttattacaggaattattttgggtgacccgctgacgggggcaatgacaggcgcttcgatcaatttagtttatctaggctttatttcagctggtggatcaatgcctgctgatatggcattggcgggaattttaggaacagccttcgccatcacaggtggactcgatgccaaaacagctttgtcagttgctgtaccgatcggtttgttaggaacaatcgtctggtatgggcgaatgacctttggttcaatctttgttcacgtggcagataattatatcgaaaatggtgaatacaataaaatttggcgagccaatgtcctctttccgcagcttttgaccgcagtaatcacgatcattccttgtggattggcggcttacttcggagcgagctacatctcaggattcattgaggcattgagcggaacggctctgacgatcttcacagttatcggcggaatgatgccggctttaggggttgcgatcactttgcagtatatttttaaaggagaggcgcgtgtcttcttgttcttaggctttattttagcgacttattctagtttggatttattaccattaggtgtgatcgccggattaacagcattgatctatgtacaagcgacaagcaataaatctgattcagaggaggacgaaatctatgagtaaagaggtagaaggaagtgttattcgcaaaaaggatctaattcgctcttggctgatttgggaaaatttaccgcaaacctgttacaactatgaacggatgatgggccaagcggttgcacatgttttcgttcctatttcgaaacgtttgtataacgatgatccggaaaagaaaaaagaaatgatgaagcgtgaaattgaattcttcaatgtgcatatcgaatttggttcttgtattatcgggatgatcattgcgctggaggagcaaaaagccaaaggtgttgcgattccaagtgagtttattacgagtttgaagacatcattgatggggccgctgtcggggatcggcgatacgattttccaaggagttttgatcccaatcttgttagcgatctgtattgatttgacattaaaaggaacaatctggggttcgatcatttacgctgttgctattatcgcgatcgcttggggaatgagttatgccaacttcatgttcggctatcgagccggagcagatgccgtcatggactttctcgagaagggtctgttaaataaggttctgcgcggcgccgaaatcatgggttgtatggtaatgggcggtctgatttctagttatgtaaaaatgcacgttgccttgaagatcgtcagctccaccacaacctttaaagttcaggaacagttcctggatgccgtgatgccgaatattttaccatttgcctttactatgctgatttatttcttaatgaaaaaaggctggtcttcattaaaaatcattggtctgatcgtcgttgtcggagtagttgcgggcttctttggaattttaggctaagctatcgaccagctcaaactatcagcaagtgtggtttgggctggttaactagatgaaaatattaccttaataggaatgaggctatgaaatgaaagcaattgttgaaacaggaatcaagcagctggagattcaagagctgccaatgccgaagatcgaaaaggatgaagtactaatgaaggttagagcaaatggcctttgtaccaatgatttgcgcgattatttaggcgacatgaaatatacctatccaagaattggcggtcatgagtttagcggagaagttgttgaaatcggcagcgatgtaaatcctgaacattttgatgtgggagatcatgtcgttaaatacattattccagcctgcggagagtgccattattgtaaaacagggcgtgagaatctatgtatcgaggtgtcaaaatcaacgaccttccaaaaccttgatggcatttccggctttttagggatgtcgcaatacatcgccgtaaaaagtcgcgatctttacaaatatccgaaagaggttccttttacccatagtgcctttaccgaaccgttggcctgtgtggtaaacagtgttgaaagggcccagctgatgttcggacaggacgtggtgattattggtggcggagtgatgggactttttcatgtcgttttggcgaaattgtcaggaacgcgtgtgattctcagtgaacccaatgctgaacgcaggaaattggcggaggaattaggcgcggacctcacctttgatccaaccaaggtcgatgctgtgaattttgtcaaagaacatacagaaggacgcggcgcggaagttgttttcaatactacggctcttccgcaaattgcgaaacaggcaatggattttacagcaactggggggcaaacctttatgttcagctcgctgcatccgaatgagcccgtgccgaccgatatgggggcggtccattcttatgaaaagttgattactggaacagtcagtcctaaaataccaaccttttatcgttcggttcaattgattgcaaaaggaatcgtagacgtaacaccattattagcgaagacttttgattacacggaggcagttgaagcctttgaatatgcgttaagaccagatacattaaaaacaatgattacctttgattagaagaaagcaggagaagaaaatgagtgcatctgtttatgttggattagatatcggcaccacatcgattaaggtagctgctgtaactaagcaattagaaacggtttttgaaaagcagtatgcctatgactaccttgtccctcagaaaggctggacggagattaaaccagatacatggggcgaactcgtgataaaaggcttaaaagagctgttccaacaggttcctgccgaaacggtcgcaggaattggaattaccggacagatgcacacgaccgtgtttgttgacgaacacggtctttccgttcgaccagccattatgtggaacgacaatcgtacaaagagcagtttatcagaaatcaagcagcgtttggaaagtaaagcggagacggttcatcttgctaaaatcgtctcgacaggcagtcctttagctaacttattatgggtaaaagaacacgaaccagagcaatatcagcagatcaataaatttctgattgcaaaagattatgtgaaattgaaattgaccggcacctataccacggactattgcgatgcgtctacgtcctctctttatgatttacatgcggattgttggtctgaagaggttcaagaattgtttgatttaccgaggagtttctttcccgatattcgaccagcatcgacgattattggcgagttaacgaaggaaatatgtcgggagttgaatatcgagagcaccataccagtggtttctggaaccggcgacaacgtggcctccgtgttgatttctggaggcttcgaaaatatgcagccgctggtctcattagggacttcaggagtggtggtaattccaaatgctcatcatcaattaaagcagataggcaaaaatgttgtggccaaactgactgatgaggatgaggcaatcattacgcaaggaacggtccaatctggagcgaaaatcaatagctggtggatggaaaaaattttacgaaccaagaactacacaaaggaacaagaagaaattccgttaacgctgttgggagaaaacgaggtgctcttctttccccatatgaatggtgaaaaaacactttttgccgatcccaatttgaagggtgcttttatcggactgggattggagacaagaagagcggaaatgtatctggccgtgctggaaggattggcttttggtattcgtcaattgtttctttcactgaaaaatgacgaagctccgcaatattttaccatcgttggcggtggtgccaaaagcgaactgtggattaagatttttgccaatgttttaggctatccaatcaagcggatacagacttcgcaagaggccgtccacggagcggcgattttagcaatgatgggtgtggaaggaagctttgtttttccgaaaagtgatgctcaggtgatccctcctgatccagtgattagcgcaaagtacaaccagcgttacgaaaattatctaaaactatcccaacatttacgacttttcggaggtgaagaatcatgaaagagtgtttgctttgcagtgccccattaaagctaattaaattcaagtgtgcagaagggcacgtctgcaaaacttgttacgagaaagccagtatgaatttttctcagacaatcaaaaggaaaaccaaagcagagctattggaaattatgaaagcacctcttgaagaaaacaaagaggagacatttgaaatttcacgaaggatcaatcaattaattttcttcgatgattacaaccagcagatttgtctgccaaatcataaaaaatataccaaggaaacgttaaaaccagaagtctatcccttttctgcgattgtagattgccagcttgtggaggaacagattgaaagagtggtcaagaaaaagccgcagcaattaggctgtatcaaagttgttttgactttccaaaacgagagccgggatatttggctgatcccaaattacatcaatattgatagcatggcttataaaacgatgcgttcattggcgaaaaatattgttgtcgaagtcaatcaatcgaaggaggtcgtggcatgttagtcggattgcaagaggtgttagtcaaagctagagcagaaaagcaagcgatcgcagcctttaatgtacccaatttagaaatgattcgagctgcaattcaagcggccgaagaggtaaatacgccggtgattttgcagcatgctgagggccatggttcattgatctcattagaagagattggtccgatcatgctccaatatgctaaacgcagcaaagttccagtagttgttcacttggatcatggaaaaagctttgagatgattatgcaggcgatgaagctgggctttacttcagtcatgatcgatgcctcagatttaccttttgaagaaaacattgctcgcaccaaagaaattgttaaaattgcccatagtttaggcgtcagtgttgaagcagagttgggtcatgtttttacctcatcattgggcggtggcgaaggacgcactccagacgatgatcaaattggcgaaacagatatttatactgatcccaagcaagccaaggattttgtggatgcgactactgtggattgtttagctgtggcttttggtacggttcatggtgtttatttgaaggagccgaaattagatttagatcgagttaagaaaatttatgacgaagtgaaaattccactggttatgcatggcggctcaggggtagaagctagtgattatcgaaccgcgatagaaaacggcatcgctaaaatcaattactatacctatgcgaatcaagcgggcgccgctgcattgagggattacctgaaggcggataatcaggattatttcttggaagattgtattgaggttgcaacaaaagggttgcgagaagattatatggaagcgttgaagatttttaacggaaaatagaatgagaagatgaaacggtgcgtaatcaggaaaggtgattatgcaccgtttttcttgagtgatgaggatttcgaattattctgcatccacagtaaaagtaatacggcgccagatatccagccgctcgtttaatacatttgttctgattttttgaagtaatgggctaacaaagaacattttagattaagcaaaaaacagctatctttactgaaaaaatgaattctctctagctcccctgaaccatatcctctataataaaaagatgatgaaattttgctgataaaaaaatcatcgaatgtgaggaaaagggagcgatcgaatgaaaatagcgccattcaaagtagaattatggatgaatgaacatgaggacaaagcaatttataatacaggagaaacctgcgttgactccatcagcatggatgagttattcgcgattgctggattaaataagcaggaagtgttaaacgaactgacgcaaaagcgcctgacttatggacatatttttggcaatccaaagtttaaagaagggattgcttccctttacgaaacaatccaagcagaggatatcacgacgacccatggcgcgattggcgcaaatcacttggtgctctattcattggttgaacctgaggatgaggtagtagctgtactaccaacgtatcagcagctgtattcgattccggcttctttccaagcaacggtgaagcagcatgtgctgacacctgaaaataatttcttgcctgacttgacgcaattgagaaatcaggtcagttcaaaaacgaaaatgatcatcattaataatcctaacaatccttctggtgctttaatggatcgtgggatgctggaggagattattgagattgctagagcagcagatgcttatattctttcagatgagacgtatcgcggattgactcaagaagaggtggagagcccttcaattgcagatatgtatgaaaaaggcatcagtgttagcagcatgtcgaaggtgtggtcgctggctggactgcgattaggctggattgtgacaaaaaatgtcgaagcgttagagcagtgcttgcttcaccgtgatcataatactatcagctgcggcatgattgacgaggaactagctgcgatcgctttagcaaataaagaaaaaatcttggcaaggaatctaaaaatcgtacgtgacaatttgaagattttagatgagtgggtagcaaaagaaccccacatctcttatgtaaaaccacaggcaggtaccgtgacactgctttattatgattttgatcttccaagcagagaactctgtcttgagctgatcgataattatggcttgctgtttactcctggagattgttttgaatttgaaaactgtgttcggatcgggtatggctgtagtacagaagaattgattgccggtttgaacaaattttctgaatacttggcgacgatttaaaatttgagagcgtaatgatctttctaaggtcttacgcttttttgctgtagaaataatcttgttggttaataaaatcctacaattcgttaacaactgctccattatcaattacgacaagcaatggtacactaaaggtgatcagagaggggcgattaacatgacgttgttaatgggaaggattatccagaagcttagaaaagaacagaatttgacacaggggcaggtagcagcagctttaggagtcacaactgctgccgtgtcgaagtgggagacagacagtacctatccagacatttccttattaggcccgttggcacgattgttgaagacgaatgtggatcagctagtcaattttaagaaagcattgagcgagctggaagtagcgaattttgaaaaagaagcccgagctatttttgaaacaggtgatagtcaacaggcaatggacttttgcgacgcgctgctgaaagcctatcctagtgatgacctgttacgctttcgcctagcttcagtgtatatcttctatctgaacgcttcttctgaggagagtcagatgaagcatcaacttcatgaagcaattcaatcatttgaggggcttcgaacatcggaaaatcttgaattgaagcaagcctctctgcatgttttggcaagcctctatttgatggatgagcagttagccaaggctgaagtggtgatcgaggaattaccaccagtaaatcaagatcctcgaatgatgaagacaactattctatatagaagggaagcctatgaggaatctttgaagctgagtcagctttgtctattccaagaattacgagatgctagtctgaatctttatcacatagcaaaagtcgcgcgtaagcagaaggagtatgaaaaagcgattgaaattgttgaaattggtatcgaaatggataaactgcttcatattgatcagatttctggcaccaatgccaattactatttgtttaaagctgaaattttagcgattcaaggaaaaaacgatgaagcactaaaggaattaaaaaaatttatccctgctttaaaaacagcctttgcattgaagaatccaagaaacgaccttctattcaatcaaattgcgttgaaggactcctccgtttccacccaatatatcgcagaacgaatggctgatttaattgaacaatctgaggaattttatccattgttggaagacctgcgattttcagcattattaactgaactgagaatgctgaaggaatagattacgaatctggagggttggataactaattatccattctttttaacgtactaaaaatcctatcactttcaaagtatcgcctccttagtcgaataatcattttggatatagggttattgccaagactttggtatgataatagtgaaattatgagcgaattttaaaaggaagaaaaaataaggaattggagtaatcactatggacaccattcaaaaatggctgcaaacgcatcagaagcgactagcgtgtgattttgctgggattgcatgtaatgtagcgacagacgataaaccaaaggagattcgctggatttatgtagcggggaatcaaagtgaggcctataaaaagattcgattgcaaatcggcagaggtattgctggattggtttggaaaacagcacgaacacaattagatgagaatatactagagcagccagaaaagctgattgattatccaattgccagactagaaaaattacaggtcgccttagcagctccggtaatcaagcgcaaagaagtggtggcggtcttgttgctgggctatcgccaaaatcatcagtttactaggactgaaagagaacaattggaaaagctggcaagtgaattgagcgaactgttcgaggaggatcaggatgattgaatttcctttatcattgtttcaacgtatccaagaagcgctatggcttttagatcaatccgatcaggtgttggcggttacacaattagccaagcagattgaaacaaattatcgatttagcttaaaagcaatattggaaattagtcgaggggaagggtgcgcgctgcatagcacaaaagaagagtgcttaaattgttcattgccaggaaaaatatctccgtccggatttccgtttgtcttaatcgattgcaatggaaaacaagaagagttctggggaagcctacaatctgatggtaagcagagaattttgcaaattcaagcacggccaactatttctaccgagacctccttttttgattacttaaataatgcgcgtgagtatgaacgaaagaaaattgctcaagatttgcatgacggtattgctcaaagtgtctacagcttgatgctggaaacgcgaggattaaaatggttgtcttccgatgcccagatggagaaattaaaagggatcgatcgtcatttttcagaggttctaactgaaattaaagaaatggctagtgaattacggccaatggcgattgatgcctttggacttgttcacgcattggagcagtttgttgagcgaaccagtgaaatgaccggttttgaaataaatctgttgcgtgaaggtgaagagcaaaccatgaatgaaaccacgcgaataaccatttaccgaattattcaggaagcagtcaacaacgcgatgaagtactcaggtgaaaatcaaatgactgttcggctttcgtttcagactgaagatttgctagttgaaataaaggatcacggaatcggatttgaaggagagcataaggaaaagggatttggtctggcaaatatgaaggagcgtgcccattcaattaatagcaagttaaccatttacgctaggccaaaccaaggaacgtgtatcaaacttcatgttcctctgaaggaggagataaagtgagaattcttattgcggatgaccatgcgatgattcgtaatgctttggcatttttagtgaatgctcagccggatatggatgtggtggcagatgccgcagatggacacgaggcctttatgctggttgaaaacaacccaattgatattcttttaatggatatcagcatgcctcctggtgagaacggtttattgactgctaaacgcatcaaggaaaccttcccgcaggttaaggtgattattttgaccatgtatgatgatcgttcctatgtgcaagaggcgatgaaggcgaaggctgatggatttattttaaagacagcaaatgacgagaccttgacaaaagcgattcgaagcgtttatgctggcaagcgatactatgatggctacacggaacaggagttaggcgagattacgttagagaaagaagatcctttgtacgccagcttgtctaagcgtgagaaggagattttgccactgatcgccctaggaaataataataagcaaatcgccgaacggttattcatttccgtaaagacagtagaggtccataaggcaaatattcgaaaaaaactgaaattggaaagttacgcgagtctattacaatacagcttaaaaaatcatttgattgatttctaaaaaaaaggaattgtttggagcctgcgtaagctgatttagttaggagaagagaaatgatcgggattatctttgttttacatggtcgcaaaaacaagctttcagttgcaaatttttcagggattgaagcagcaacgaaacaccttacgctcccttatgaaatagggctgctggaaggtgaacatcaaaccttagagatggctattcaatccttattatcgcgacaggtaagcgagattatttttctgccggtgctgctttttccagccacccacgcaaatgaggatttaccgaagcgtgcccaaaaagcgcttaataagcaggtgccctatcaaatcttgcctactttgggaacaacgcatgcagttgagaaattcttattgcagcaagtgacctcggtgaaggattcaagggcagaggtacttttgatcgcacacggcacaccccattatcaggaaccgtttaagcagctagcgcaaatcgctagtaagcttgaaaggcaacttggacgaagggtctatccagctgattattatggggagcatccgtatctgcctattttggagaagcacagcgaacctatgattattcaacgtttatttttaacggaggggtatctggcgagaaaaataaaaaataatattattgaacacagaggtgcacaggatattctgctgcctactatgcaagatagcgcagcattagtttcagcgattcttgaaagactaacgccctacatttaatcgtgattgaaagtggtcgcttcagtaaatttcggattatttttaagcttctgcctctgtaacattaattatttgaaaaagcaggtgtgactattacttaggtcacatctgcttttttgactatgaaagaaggtataaaattttcacatgaataaatcgctttacagcaagcatatccatttccggcttcacgaactagcttttctacgcaagctatgcatacagttactgctaaactccattaagcagaactagcatatcggcaataagcaaaagctgagcgagtttgcgaagccttccttaaataattaggggattccctaatataaaaaacacttgatatcctttattgtgattatgtgaacaaatagaagctgaggtggagatagtgaaagaacggttagtggtaattgggaatggaatggcaggcgttcgtacagtagaagaaatcttggagcgcgatcctgatcggtatgagattacgatcattggaggcgagcaatatccaaattacaatcgaattatgctttcgaatgtattgcaaaaaaaaatgacagtcgatgaaatcattacaaacccaaccgaatggtatctggaaaatcaaattattctgaaaaatgcagatccagcggtaggtataaactcagaagtgaaaacgatcacaactgaatcaggggaagttgttgcctatgacaaaattattttcgctaccggttctcatccctttattctgccaattcctggagcagataaggaaggggtggccgcttttcgaacaatcgacgatacggcagaaatgttagctgcggcagcaaaatattcaaaggcggtcgttattggcggcggcttgctaggtcttgaagcggcaaagggattgcaggagcaagggatggatgtcacggttgtccatctggcaaaatggctgatggaaacacaattagatgagaaggccggaaagttattgcaggcagagcttgaagagcaaggcctgaaattcttgatggagcatagtaccgaagagattttaggaaacgagcgcgtgacaggtatgcgtttttcaaacggtacagaaatcgaaacggatttgatcgtgatgtcgatcggtattcgtccagcggtggagctggcccgggaaattggtttagaagtgaatcgcgggatcgtcgttaatgattacatggagaccagccttccgaatatctacggagtcggcgagtgtgtcgagcacaatggtatttgctacggacttgtggcaccgctgttcgagcaaggaagaatattggcagatctgcttacggagcagccagaagttaaagcttatcaaggttcaaagacctttacctcattaaaggtttctggtgcagatctttattctgccggcaacattttaaatactgagggtatggacagtatcgaagcctttgacagtgcctcaaaaaaatataagaaaattttcttgaaggatgggaaaattcagggaatcgtgctttatggcgacacagatgacggtagtcgctactacaatatgatgaaaaaaggtcaagaaatcaacgagctggatctgcagacgattgctgtgcttcaagcaattggtgaaggagcaggcatggggacggacgttgtcgaatgggaagatgacgaaacagtttgcggctgtaatggcgttgataagggcacgattttgcgttcaattcgtgaaaagggcttgtccagtgtcggagaagttggaaaggtcacgaaagctggtacctcctgtggaaagtgtaagccgcaggtccaaaccttattagaatatgaactgggggatgccgttaccacggcaacgggtatctgtccttgtacagatttaaatcgtgatcaggtcgttacacaaatctatgctaagcatctgacaagtacgcaagcggtctttgctgaactagattggcgtaacgttgagggctgttctaaatgccgtcctgcggtcaatttctatctgaatgtcgcttggcctgcggagcatgaagatgaacgagattcacgagtagtcaatgaacgaatgcacgccaatattcaaaaggacgggactttctcagttatcccaagaatgcgcggcggacaaacgaccccgcaacagctaattaaactggctcaagtagcggagcgctacaatgttccattagtaaaggtaacgggttcgcagcgtatcggcttatacggagtgacgaaacaagatttgcctaaaatttgggaagagctagatatggtcgctgctcaagcttatggaaaagtgttccgttcggttaagacctgtgtcgggcaaagcttctgtcgctttggcacccagaagacgatggaactaggaattaaaatcgaagaaaactttgagtatattgatacaccacacaaattcaaggtaggtgtttctggctgtccgcgaagctgtgtggaatcagcagtcaaggactttggaatcatcggtgttgaaaatggcttccaaatcctaattggaggaaatggcgggactgagctagtagaagcgcagcatttagtgaccgttgaaacggaaaaggaagtcatagaactatgtggcgcaatgctgcaatactatcgagaaactggaatttatggtgaacgaacagcgccgtgggtggagcgaatagggtttgaaaatgttaaggctgttttgttggatgctgagaaacgtcaaacactttgggacagtcttaatcaagcgattgcggctaaagcccgccaggattcatggggaccaattaccaaggacgtggatttaagagaaaaaatgtataccattgaacggccagaattagtgggagtaggtgaataagttgacaaaattattagcaacaaaaaaagcgaagttaattccgcgaattggccgcttgattgatttgcagggagaaagaatcgctctttttcagctttccgatggacgagtctgtgcgatcgaagattactgtccgttaacgcagggacctgtgttagaaggaattgtatcgggggaatatttgtacgaaccaatgcgtgaatataagatttcattgattgatggaaagattcaagagcctgatgagggacagctaagagtttttccagtagaaatcattgatgatgacatttatatagaggtttagtgatgatttcatttgttggagctggtccgggtgatattgaattactgaccctcaaaggaaaaaagcgtctgcaggaggccgatgcggtgatctacgaccgcttagtcaatcctttgctgctgttttactgcaaaccagattgtgtgtttctttatgtggggaagacaccgtatcagtcaagtatgcagcaagagacaatcaaccaattattgctggatacacacaaaaatcccagcaaaattgttcgtttaaaaggaggaacgcccgaaatatttggccgtttaacagaagaactggaagtagttaccggtaataatatcgcatttgaaataattcccggtatttcatctgctagtggctcagcagcctataacggtattcccctaactgaacgggggcaggcaagagcagttacctttatgactgctcatttaaaaatgaatgaggaagttctcttgcctgaacatcctcctgaacagacgctttgtatctacatggggatcgaggcattgccaaagctcattttacagttggtaaaccaaggtttttctgcgaatacgaagattgcagtcattagctgggggacctatggaagacaaaagaaagtgtgcgggacattttcaacgattgaaggccttatcgcaaaagaaagggttaaaaatccggcaatgattttaattggcgaagtggtttcaaacgaacgccgattcaattggtttgaacagctgccagcatttggcaaacggtatctgcttgtttcaacacgttcgccgactatcgacgaactgattcactacacaagtgtcggagcggatatttggtggcaccaggtaggagaaatgcgcgacaaacgcttcgatcctatcagtgaacgttatttatcagaacagcaattcgaagaggtcaaattcatagattcgacttcagaaaaactgttttgttctttaaaaaaaggagagtgaaaggatgtcattatcaccgaaggatttagtagatgaagcgattacgcgaggaaaggccaaggcgaattacagtctgttaactatcgctgtgttaggaacgatggcgggaatctttattggcttagccggagttgcaatgatccgtacgatgggatcaatgccaaaggaatggggcaccttagtgaatttgctgggagcagttgtttttccctttggtctcatttgcttattattagttggcggcgaattggttacaggaaatatgatggcagtcagcatggccttatatgcaaaggaaatcacgctgaagcaatgggtacgtaatatgttttttgttacagtgtttaatttggttggcgctttagcagtcgctgtattttttggctatttttcgaacaccttgcagggagattttgtcggtcggacgattgcggtggctcaagggcgtgtggcagatggcccgttacaggcatttttatcaggaattgcatgtaacatcttagtttgcacaggggtctatatgaatatggcctctcgagattttattggtaaaatattcggtacgtggctgcctgtcgcagggtttgtcatcgcaggctatcagcatgttgtggcgaatatgtttttggtagctgctggagtgttagcaggtggattaacgattggccaattcattgaaaatatggtattcgtctggacgggaaatctagttggcggcggcgttattctagctggcatgtacttccttgcctttaaagtggggatgaaacaaaacaccgaaggattggaaagtacgaagacttcctctataatagtggaggaaaaataattgatcgaggaatacgatgagaaaattaaaggttgggacaagaaagagtcccttagccatgaagcaaacacaaattgtgataaatttgttaatgacacactgtccacagctggaaatcgaaattgtcggactttctactaaaggcgatcgactgcagcaggcacctttgactcaaattggaggaaaaggtgtctttgttaaggaagtcgaataccagctgcaacaaaaaaagatcgattttgccgtacatagcttaaaagatatgcccgccaaccttcctgacgacctcattctagcagctacgcctaaacgtgcacagccatgggattgtctgattttgaagaatgacgctgtacttgaagctgaaaaagaggtaacgattggtacaagtagtctgcgaagagcaaaacagttagcgatgaagtatcctaatatgcgatttgttccgatccgtgggaaaatagaaacccgtttggagaagatggtaagagaaaagatggacgggactgttcttgcttgcgctggattagaacgaatgaactattttgatcaattatctagctataagatattgcctccagaattatgtgtccctgcaattggtcaggggattttaggtgttgaatgtcgaaaagaagatcgcgaggtttttgatttgttagttcaaataacggatgaaaaaacatcttcagcggcaacggcagaacgtttctttttacgtcaaatgaatggcaattgcgaccttccgatcggggccttcgccgagaaaaatgggcaggtatgggatttctatgcttttttggccgagaatatggatgctacaggcagacagcttcacttgttaggagacgatccgctatccttagcggaacaggcggtcaaggagttattttctcaaaaaacctattgttgatatgaaagaaagatttcgtggtcattaggatcacggagtctttttttgcgatttgttaaggttgagatgtagatgtcgtttttaaccaaaaatagaacaagttggttagccaaatcgtatgcttgagttagctttggcaaaattaggaatacttgaatttcccattgctaggaaaaaagtaagtttgtgaggccagcatagattttcctataataagcttgtaaataaatgaaagtggtgaagaaaatgaaaaacatcttgttaatttgcggttcaggtgcttcaagtggctttatggcagcggcgatcagaaaagcagccaaaaaaagaaaggttgaagtaacagttaaggctgccagcgaatcgcaattggacgatcggattaatgaaatcgattacttgctgataggaccacatttgtcttatatgctaaatgatcttcaagagcaaaccaaagacaaaaatgtcaaggcggcagtgattccgcaagcagtttatgggacgttgaatggagagaaagcgttggatttgattttaaaaatggagggttaactgatggataaaattatgaattttatgacgaattcctttgctcctaaagtgaataaagtagtaaaaaatccttggatttccgctattcaggattcgatcatggtggcattgccgctagtttttgtcggctcattagtaaccgtggtgtcactattaaaaaatattttcagcggcatgcctgatttttccatgattagcaatttttcatttgggatgtacgcattagtagtagcgtttttaattccttattacttgatggagaaaaaaggctatggtggtcagaagctgatttctggtgcagcttcactggtattattcatgatgctgctttttccaacaatgacagccgacggtgaggcggtcttcattctttctcgcttcggtgctacaggtatgtttttatcaatgattactggactatttgtcggttttgtcatgaattttgctgtgaagtattccttctttgatgaagatacaccgattcccgattttgtcgtaggttggttcaatagtttactgccaatcacctttatcttactggtaggctagctgatcacattccaattcaaaatcgatttctttgatgttgtcttgctagtcttcagtccattggcaagcattgtccattcgtatccgggctttgtgttatccgttttcattcctgtatttctatatacattcgggatttctggctgggtaatgatgcctgtggtttatccggtttacatgtcaggtttggcagcgaatgctgaagctgtggcaaatggtggacaagcaatcaacatcgctactcaagaaacctgttacgccttttcgtcgatgggtgggatcggaacaacattggctttatctgtgatgatgcttttgttgagtaaatctgcgcaattaaaagcaatcggtaaagcagtcatcattccttcgatctttaacatcaatgaaccattggtatttggagcaccgatcgcctttaatccttacttgatggtgccaatgtggatcaatagtattattgttccaacgattgcttatgtaacaatgtcactaggattagtcaacataccgtctagcacatttctgttgtggtatatgccatatccatttacatcttacttggcgacgcaggattggcgagcgattgttgtatgtgtgttgatttttgccattacgtggctgatattcctgccgttctttaaggcctatgacaattcattggtaaaacaagaagctcaggaggccatggaggaagcagaggcagaagccgttcattaaaaataactataagctattagcaggaggtcgcatatggaagagacaaagcatttagaggagaatgatcaattaaatcaattatcgatgaacattttggttcatgcgggaaacgcacgtgatcatctcgttcattctttggaaagtttagaagcaatggattttactacagcaaagcaagaggttcaggccgcacgtaaagaggtagtgattgctcacggtttgcagacagatacactgcaattagaagcctcaggtgaacagattcgttattcaaccttgttttgccacgcacaagataccttaatgacagcgcaaagtgaaatcttaatcggtgaacatttggttcgcttgtttgaagcatttagtcaaaaataaacagtacaattattcaaggaggaatttcattggaaaaatatcaaataccaaaagactttttatggggcggtgccatcgcggctaatcaggcagagggcgcctataaagttgatggaaaaggcgtcagtcttgcggacttgcacaagtattatccagataaaagcaatgctgagattgcagaggaacagcataaggggatgtctttggcagatgtgaaggctaacctagcggatacggaaggttattatccaaaacgtcatgggattgacttttatcatacctatgaatcagacttggaattactcagcgaaatgggcttcaagacctttcgtacatccattgactggactcgaatttttccgactggtgatgaaacggagcccaatgaagagggattggcctactatgatcggttgattgataagataattgaactgggaatggagccgatcattactattttacattacgagacacctgttgaaattacgttgaaatatggcggctggaacaatcgcaaagtgattgatttatttgttaaatatggaaaagtagtcttagaacgctatcaaacaaaggtaaaatattggatcgtgattaatcaagtcaatctgattcagtttgagccctttaactcaacggcgattccttatgatacggtagataattatgaggaagccagctttcaagcggttcatcatcagtttgtagcaagtgctaaattggcagcctatgccaaaacaatcaatcctgatatgatgattggtacaatgatggctgattgtacggcgtatccttactcctgcgatcctgacgatgtgaacttggccttgcgtcgaaatcgtatgcaatatttctatactgatgttcaattccaaggagcctatccacaatatgccttgaattactttgctgaaaatgacatccacctagaaattactgatgaggacaaacaattgttgaaggatcatccaatggattatttagccctgtcttattactactcgcaaatggtcgacgcttcaaaaaatacgatgagcccatcttctgtgacaccaaatccgaacttgaaggctaatccgtgggggtgggcggttgatccgcaggggctgtacaattcattatcccaatactgggatcgctatcacaaatccattatcattgcggagaatggttttggcatgtatgacaaattggaggatggaaaggttcatgacgattatcgtatttcctatctatctgagcatattgcccaaatgaaacgcgctatgtatgacggcgctgacgtgatcgcctattgtgcttggggcccgattgatattatcagctgttcttctgcccagatggaaaaacgctatggcttcatttatgtcgatctggataatgaaggaaaaggctctggtcaacgaatcaaaaaagatagctttgactggtacaaacaggtgattgcttcaaacggcgagacattataatcaattgaaaagttgatctttgtgatcaacttttctttgaatggaggtgtaaatgtgctgactaaaaaagaaaaagagctgattgattatttaaataaaaaagctcgttgggtaacctcagatgaactagctgaatttagcagttgcaccactcgtacgattcgtaatcgtattgccaagatcaatcaaaacaatccagcgcttattttaaccagtcatcgcggctaccagctgaatggggaagtaggtatcgagtcaggcggcaccgaggatcgcaaatctcgaatctttttggagctgttgaagcattcgtcggagggagtcgacttttatgaattggcggagaagcttttcatctctgaatctacgttaaaaaatgatatccagcaattaaaaaaagaaatcaccaacgatgcgattcaaattgttttcgaacaagattatattaagctgacgggaccagaacgggcaaagcgacgttatcttatctcacttttatacaatgaaagtgacctgcaggaaaagctgaaggtcagtattcagcaaatgattgggtatatttcgctggaaaagctgcagcagacgattcaaaacgtgttgactgaaaacaatatccagatcaatcaatactcgctgaataacatcgtactccacttcgctatcagtattgaacgtattcgccaagggcatagcctaaagaaaagcttgaatgaaaatcccgcacaaaacagtccggaattcttaatcgcagaagaaatcagcaatcaattggcacagcaatacggtattcatttttcccatgcagaattagagcaattgtcattattatttattggcatgcaaaatgaaaacttagcaaaggaaaagaatcagcagctctccagctttgttgatcccaaaatcatcagcgccttaaaggatgtcttagccgaggtagagcggacctatttagtcgaattgaacgatgaggaatttttcaataaattagcgattcatctacaaagtctgtattatcgttctcactacgaaacctttactcgcaatagcagcttgttggatttaaaaacagcctatccgttgatttatgatctagccgtgtacatttcttctttaattcaagatcgcttagctatctggttcaatgatgacgaaatttcattcattgctttacatattgggtcatttcttgaaacgcaaaagcattttcgtaatcagattaccattcaattagtagtgaacgattatcatgatattggcagaaatctaaggaaagaaattgaagaacgcctcggagaaaatatcaacgtcatagtgacggaaaaatggaaagctgcgaatgctgattatgatttattgctaacgacagatcgggaaacagcttctaaaaacgaaggggccgtttttatccatccttttttaaccgacaaagatgttaaaaaaattgaaaaacgaattgatgccttaaaatcacagcgggaaaaaagacgcatgtatcaaaccatcgaaaaattcattttgccagaattgtatttcaatcagtttgatcctgctggattaacgccgatggaaatacgaagtcaaatcaatcaacgaatggtcaatgaacactttgtggacgctcatttcttagaaaaggtagaaaagcgtgagcggatgtctccaaccagctttccatcaggaatcgcagtcccccattctgtcgagctggaagccaaaagaagcggagtggcaatcatgacgctgcaagaaccattggtttgggctgatcatacgattaagctaatcgcttatattgctattaataaagaagaagcaaatgaattcaatgatttttttgagaaatttattgagattgtttcagaaccgatcaataccaagcagttgagtatgagcgaagattatgaggcgtttattttacgtttgaaggcgatggtggaggccgatgagtaaaaactttctaggccggttgttcttagtgatttttggtacgatcttgatgggtcttggaatcgaaatgatcgtggtggccaatcaaggctttgattctgttagtacgttgatcttaggcttaatgcaacatacagcgattccttttggacgctggagtcaattgataagcttcctatttttattgatgacttttttgtataatcgcaggattttaggaatcggcagtctcatcaatacattcctagttggtgagaccatcaatcgaacggcaaatatttttcaatccatcgatttttttcagaacagtatgggaagttctgttttaggcttttgtgtaatggcactaggcacagcgatctatttaacaggtggtttaggttcaggtccattggagggaatgatgttttgtgtctgcgattgtttacaggtttctctgcaaaagggcagaatcatactagattttatcattgtcgttagtggaatacttttaggcagtacctttggcgttggcacagcctttgctatttttctcttaggtcctatgatccagctttgcttatctttgttaaaacgagttgctgtaagtagcacaacgtttcgcagtaaaaagcaattatcaaaataaaattggtcttttaaaggatgtacaaagtcttgcgcatccttttcgtaagagcgagaagaagagaaccgtttaataaaaaaagcactacgttaattagttggtgattccaaaactaattgacgtagtgctttttttattcctttaaactcaagatgacttttcgaactttggaaatcgtttcttgcgcatttttactgttatagaacatcaaaatcacgtaaagggaatcgatgatgctcaattgagcaattcgggaagccaatgcttcagagcggaattcgatttcctcagagatggagataaagacgacatcgcctaatttagctaagggtgaattggcctggctagtaataataatgacttttgttccagcttttttgacagcttcggccatatggatggtttcctttgatttgcctgaatgggaaataaacagagcacaatcttcatccgtaagtaaagaggcctccattaactgaatatggtaatccgtactatgcccaacggaaataggagaacgtaaaaacttatggtaggcatcggtggctacgatttctgatccgccgacgccaaagaaatacagccgcctggattcggagatcattttaaccgccttttttaaatcctcttcctttagtaattttttcgtgtcggtcaaagtagtcatgtttgaatcgaaaactttttgggccatcgttaattcagaatcgtccttttgaacattttcgtgaatcgtcacagccgttaaatcattttcttgcttcaataaagccattttaaaatccttaaagccgttaaagcctaaagttttggtgaattgaaagaaagtagagtcagcgattcccagttcagcagaaagatcactgatagagctatgactaactttgtttggatttttcaatatgtaatcggcaatggcttgttctttcggactaaaatgcttatacattgatttaatttgtaagtgaatagggctagacatcagcgttcctccttcattcagtagtagttactcataagatactaggaaataaataaaaaatcaacaaaaatattttttattttttctatttacaaaaaatatttttttgtataatggagacataagattgaatgcgttatcagaaatcggtttacttatcgtcattcgatttgtaggatgctttgttttttttaaaaaggagatgaacggaataaaaaaaggtagataaggtctagatagagcagagaaattggcatcatgagttgcaaagcaagtctaaaaggagctttaaacatgggaaaatacaaaatagcgatcgtcaattcaagtagttttggaaaaatcttccatgagcagttggagcgtttggagaagatcggcgaggttcagtcattcactgttgatggagagatcggcggacgtgagctggcagaattattaaagggctacaatatcattattgcgagtgtcaccccatttttcacacaggaattttttgatcataaggatgaactcattttaataacaagacatggaatcggctacaacaatattgatattgaagcagcacgtaagcacgggacacttgtttcaattattccagctttagtggaaagagacgcagttgcagaaaacaatattacgaatctgttagccctcttaagaaaaacagttgaagcagatttaagcgtcaaaaacgatagctgggaggatcgagcaaagtttgtcggtcgaacactgtttaataaaaccgttggagttattggcgtcggaaataccggcagctgtgtcgtagaaaccttacgaaacggatttcgttgcaatgttttagcctacgatccgtataaatcagcactgcatattgaaagctatggtgcaaaaaaagtggacctgccgcatttactaaaagagtcagatatcatttgcctttgcgctagtttaaatgaagaaaactatcatatgatctctacagctgaaattgcgcaaatgaaggacaatgtgtatctttccaatagcgctcggggagcattattagacgaagaagcaattgtcagcgctttaaaatctggaaaaatcgctggtttagcgacagatgttttagaagaagagccaggacgtaaggatcatccgtatcttgcctttcgcaatgtggttatgacgccgcacacttccgcttatacgatggaatgtttgcaagaaatgggagcgaaatgtctgcgagatgttgaagatgtcgttgctgggaaggtccctgagcgttcagttcaagctcaaagcaatgttttaagttagaaaggagcggaaaatgctaactgatttgaaggttaaagtaggcccgcagttttatcggtaccatgtgggagcgattgattttgtttccgatttgttacaagaattttcagcgaaaaatgttttaatcgttcatggacagatttcctttgaaaaggccaaacctttcttgaaatttttaaatgaacgaacgtataacttccattttctacagtacactggcgagtgcagctactatggagcagaacgaattgccaaagtagtaaaagagcaggaaattgattttatcattggtgtcggcggcggaaagctgacggatctagtcggctatgcctctcataccttaaacattcagtatggtgtgattccgacgcttgcaagtaattgcgcgccgtggacaccactttcagtgatgtataaggaaagcggtgaatcagaagggaaaagcgaacattttctacgacaggcggccttttttatcactgatcctaaattaatcattgatgcgcccgttaactattttgtggcaggcttggctgacacaatcgcgaaatggtatgagtcagatgcaatcttacaacaagagcatttaaaaaatgaacccttcttacaaattgccggctatacatcggaattatgtaaaaaagccattttagatcattctgcaaaggcaatcaaggatatggaggcgggcgaagtatcagaagaattcattcatttatctgaaattgtcttcgccgttgccggtttggtcggcgagttaggtgacaaatacgcgagaaatgccatcgctcatgccatgcatgatgggatgagcaagtatattcctgaaagtcatgagtttctgcacggagaaaaagtcgcttatggaattttttatcagctggctgttgagaaaaagtgggagcaaattgatgatttattaccattttatcaagagctttctctaccaacatccttgaagcaaatgcagcttttccccgaagaggatagtgttctagatcaaatcgtagaattcattgattcaaaggaaaaggttcatctactgccaataccaattacagtggatttattgaaggattcgatttttgaattagaagcatatattaatgaacggtaaaaaagctgtttgcttatccagacgttagagctggatagtcgattagttggatacgatacagataagaatattaagtatttttgtgaaaaacaggaagaatactcgatagaataaggaggaacttatggatactttaagtgttatgcagagtctattgattgcgttatgggtcgctgcggttatgtccagatggcttggaggaggagcaacactgaccttgcgcttctcgcctttgatgacaggattagttgttggaattgttatgggcgatgttgctcaagcgatgattgttactgctgccctgcaaatgatttatatgggggttttctcaccagggggatcaatgcctgctgaaccatcgatcgctgcagctattgctgttccagtcgcattattagggaatttgaaaccagaagcggccatcgcggttgctgtgccagttggattattaggaagctatttgtatcaattccgtttctttatcaatacattcttaggaaaatatactgataaagcagtggaagatttgaatgcgaatgcgattaaacgttcaattattttatacccgacaattgcatcatttgtcttgttcgtaccgctagtatttatcgctctttatttaggagcaccagtcattgcagatgtcatcaatgccttagaaggaaccgtggtcattcacatccttgaagtagtgggtggcggattagccgcgattggtattgcgacgacggtttatgttatcggtcgtaaagactacatggtctttttcttccttgcttatttcatgagtgtagtattgaagtctctagaaatcacaatggtgacttacgcgatttttgggatcttgattgcgttgatctttgtacagtcgcaaaagggaagaggcgcagcaccagcagctgaatctgcagcgccaagctctggagctacctttgatgatgacgatgattatgatgacggattttaatgaagagaaataggagggaaaacacatggcggaagtaacaaataaaagtttagcacctgaagaaattaccagtaaagatgtcacaaaagcgtatctaagatggcactttgccaatgaaatacctcattcctttgaacgttatttggcaccgtccttactttatgcgatgatgccgatcttgaagaaattatataaagacgatgatgccttaaaagcagcctataagcgccagctgttatttttcaacacacaattgagctggggcggcggtgttatcactggtttgatgtcatcgatggagcaacaacgagcgcaagaagaatatgagaaaaaagaaattctgatgcaagatgatttaatgtataacacaaaagcaggtttgatgggcgcactcgctggaatcggtgatgcgattgactcaggaacggttcaatatatttttattgccatcgctgttccttgggcgcaacagggaagtgctttaggtgcgttgttcccatttgtattctttgcgatttaccaagctgcgttgggtgtgttctttgcgagacaatcattcacgatgggacgtaacgctactggattaatgcaaagtaccggtgttcaaacagctattgaagcactttccgtattagggctgttcatgatggggattttagctggtaactatgtaaaagtagagtcgacactaaaatttgcgatctcaggaaggaagttcgttattcaagaaattcttgaccagatcgttccaggtattttaccgttagcagttgttatgggtgtttattggttctatacgaaaaaaggtctgaaagtaacgcaagcattgctctggctgaccttaatcctaatcattttagccggagtcggaatcttataattttaaaaaggaagtgtgtgaaatgggcgtaattaatttagctcgagtagatgagcgtttaatccatggacaagtaatgatgaccttatcacaaaaaagcggagtaaattcaatttttgtggttgatgaagtagtagcaaaagataaattcatgcgtgatctatataaaaatgctggaagtcgaaccggacaaaagacgattgtgatcacaccagaaaaagcgaagttttattgggatgaattcaattttaaagaatacaactgtattttgatcacgaaaacagtcagtgttatctatgacttagttaaacacggtgtgccgatgaaggaactgaatatcggagggatcgctcaaaaagatcccgataaagatatcttagtgacaaaatctgtttacttgaacaaagaagacgcggaacggttaaaggatatgcatgagaattatggtgttgaagatatttatttccaagccacaccatcggcaccaaaatctagtttaaaagatgtattgaagcaatttaatctataaaaacacaggaggaagatcagatggagcaatcagaggtattcaaagattggctatttcgttaccaatatgtttatcggctgcgtcgaacagaaaaaagtaagaaacgatttctggcagccttggtgacggatatcgcaaaaatacgtgaagacgttcgtgtcattgaatatgatcagcaaaagaaatatgcttcgcgaaatgtctatgtgggcaatatcaagcaggcagatcgtgtgatttgcaccttctatgatactcctcctgaaagtatcggttcctatcagctgtttgataggaaggatcaggcgaaaaagacaacgatgtttattttgactagcacgcttattgcgattcttctaggagttataggaacgatcatttatatgcggttatcaccaaactcgtttcaattcaattcggtcagtacccttgtgattatggtgatttatgcaggctatttcgctttgctgggaaaaattaccaagggcttatcgaaccggaaaacgttagtccgtaatacgtcgtcattattagcgatgctgaaaatgatcgcagaaaacaaacaaaagaacgttgcgtatgcttttttagacgaaggcagctatggcgataagggtctagaggaactgcaaagacaggtcaatgggcactgcgaaattttttacctagacagcgttggtgcttcggctccgttgcatttggtaggcaagtcgccgcataacggaaaaattgatgactacgtcgactatcaagaatcagatcaaaaagtaagttatctttttagtgctagaaaagatcaaacgaacgcagcctattacttaaatcaggccgatctaaaagagaaacatttaaacatggaaaatattgtcgctgtaacgaatttgtttcagtgagagaaatggaggggcttatgttaggaattgtcattgccacacatggaaaactaagtgatggcttgaaagacgccgcggaagtgatcgtgggaacaacgaataatatcgccacagtcaatctaaaccccggagatgatgttcaagaattaggaacaacgattgaatcagctatcaaagaggttaatcaggctactggcgttatcgtattaacagacctagtaagtgctagtccgtacaatcaatcggttttaattacgaatgggttggagccggagctgcaggaaaaggtatatgtagtcggcggtgttaatttgcccatgctgctggaagcgatcaatcatcaaattctaagtacaccagttgaagaagccgtgccagcgatattaacgcaaggaacagatagcttagctgtttggcatacatcagatattgaagaggacgatgaagaggacgggttttagtttgtgaagtcaaagtacaaatagaagcaggataggagactaagattaatgaagtggggctttagatggtatggagaaaaaggcgactccattcctttaaatcatgtaagacaaattcccggtatcaatggagtagtcggtacattactgaataaaatgccaggtgatgtttgggaagtttccgagatacgcgctttaaaagaatcaattgaaaaagaagagttagaattattaggaattgaaagtgttgcgatccatgatgcgatcaaagcaggaaccgctgaacgcgatcattacatcgataactatattcaaacaattagaaatctttctgaatgtggcgttcatttgatttgctacagcttcaaaccgatttttggctgggcaaaaacaacattgaattacgagaatgaagatggtagcttagcattattgtacgatcaagcagtggtagataatatggaaccaggagatatgtacaaattaatcagcagtcagtccaaaggctttcagctatctggttgggaagaagaacgcctgaacaagttcaattctctagttgaaatgtacgaaggtgtgacagaagaaattttatttgataacttgaaatatttcttggagagaattatcccagtttgtgaagaggccgatgttaaaatggggattcatccggatgatccgccttgggagatttttggcttccctcggatcacaaaaaatctggctgatttgcaacgtattatcagcatggttgattctccttacaatggtattacgttgtgcaccggagcgcttggtgctgatccgaataatgatatggtagaaatcgttcatgcaattggagatcggatcaattttgttcacttccgcaatgtggaatttttaggctatcgcaagtttaaagaaactgctcatttatcaacagaggggtctcttgatatgtatgcgattatggaagctttagtcgaagttggttttgacggtgtcattcgtccagatcatggtcggacactttggggtgaagtagcaagaccaggatatggcctatacgatcgagcgatgggcattacctatatgcaaggactgcacgaagccattaccaaacgtaaagactagaaatccgatagaaggtgagaaaaaataatgcctgcaaatatggagcataagatctatgagcaattaaagcaaacaaagcttttaccactatatacagcaacagatttgagctacttggctaaagtagaagagattctattggaaaataatgtcccgttgattgaagtaactttccgaagtgatctagcaggagaagcaatcaaacgcttagccaaatctggtaagctgatggttggagcagggactgtccgaacactaacggaggctaagatcgcgattgaaaacggcgcacagtttgtcgtgtctccagcagttgttcctgaggtcattgagtattgtttggagcaagagattcttgtatttccaggaactgcaacacctagagacatccaaacagcaactgaatatgggatcaacgttgtaaagtttttcccggcagacatttatggaggcttaaaggcgataaatgccttgagtggacctttttacgatgtgaaattcctgccaaccggtggaattaacgcagaaaactttgtcgaatatttagaaaatccacatgtaatcggagtaggtggctcattcattctttctgagaaggtcattatggaagacaatggagagaagatgaaggatattctcaaagcattggtccaacaaataaattagtagaaaaagcattcatgaggccggctttttgcctcacgaatgcttttagtttagatagaatcatcacagaagaactcttcataaatacgacacatttttttcttatttttatttaaaaagctcataggtttttcaaagatgtagcgtaagatgaacttaaccctaaaaataattctttttcccctgtgaaagcaggaacccccagaaataaagctgatgcgtgcgcatcagctttattttgtgtatgcccaagcatttgccagctgcgacataagctcatcaatcgagtattttttcatgtagtgttctttatcgggaccgtcgttaggatcataaacaataatctgatcgctttgcaagtcctttttaatcaccataatgtggccaacatcggtaaactcaccgggattaacggaaactacgattggctgattttgattcaaatgctcctgaatttttgcctgatctttgccgaggtcttcaacagtcaatccatagttttgagcaaaggcaggaaaaatcgaccaggcggttccttgccctgcttggtaatactggttgccgctccattgtaaaatttcagttggatagacggttcggtgctcccaataagaaagaatcattgctaaagaagtaatcgcacaaccgttagtggctaaatcattttgcgcagagccgctgccataggatttgtcggcccaacgagaatcagtttgtattagtaaaggaaaattttgtccatgctcctgtaggtattgattcgcattagcggaaaaatcctgttgactattaacattattattaaagtggaaaactcgagaagagaggattaccagactagaaatcactaaaaagcttcccagtaaaatcgaaaaaggacgaatttttcgtcgcataaaaaacacctccactcttttattaaaacgaaaaaagggtgaggtgtcatcggtcaaaagttgtaagttattcgaattcttccagctctaagctaagttcttcccaacttgaaagctgttcttcctgctcagccttttttgcttccaagtcatttgtcaattctaatagctgaacgtgatcattcaaaatatccggctgactcatttggatctcaagttcggcgatctcttcatccaaagtggaaagtgtttcttcgattgcttcaatctttcgacgtaagctgcgaatcagcttttgttgttccttatcttggtaaaacttttttttaggcgcttcgacaggtgctgcttcttttgcctgtaattcagcgatttcttcttcttcttttttcttttctaaatagtaatcgtaatcaccaagatataacttgctgccctcaggagacaactcgatcactttgttggcgatacgattaataaagtagcggtcatgggaaacgaatagcagcgttccttgataatcgatcaaggcattttccaatacttctttgttatcaatatctaggtggttcgtcggttcatcgagaatcaaaaaattctccttattcatagaaagcttcgctaatgcgacacgagccttttcaccaccgctaagcagcgggatcgttttttcaacatcttcgccactgaaaagaaaaccacctaatacattgcgaatatctttttctggagtcgtcgggtgttcatcccataattcagctaaaatcgtcttattgccgtgcagatcagcttgtccttgatcgtaatagccgaccgtgacattggttccaaaatgcggggtgcctttgatgaaggggatttgaccgatcaacgattttaataatgtagactttccaatcccgtttggtccgacaagggcgatcgcatcttcacgacgaatatccagatcaatgggttcagaaagtgtttcctcatagccgatagcagcttcttcgacttgtaagacgacgtttcctgaaaccttatcgatatcaaacatgaatttcgcagatttttccttgccgtctggtcgatctagtcgatccattttttctaatgtttttcgacggctttgtgcacgtttggtagtggaggcacgaaccaaattacgtgcaacgaaatcttctaatttttcgatttcaacctgctgtttttcataagccttccagtcgctagcaagctgggcggcttttaaatcaagataacgggaataatttccagtgtaatgacggattttatgacgagaaatttcataaatctcattgacgacgcgatctaagaaatagcggtcatgggaaacaatcaagagcgcaccagagtagccttgaaggtaatcctccaaccaagccaatgtctcaatatctaaatgattcgtcggttcatccaaaatcaaaatatcaggtttgactaatagcattcgtgccaaggcaagacgggttttctgaccaccggataatgtactgatttctttatcataaaagctctcatcgaatttaaatccatgtaaaacactgcgaatctcattttcatagccatagccattctgttcattaaagtcatgctgcagctgatcgtattccttcagaagagaagtgtaacgactatcgctttcaggtgtttcgccaatcgccacttcaacatctcgcatccgagcttccatctggcgaaccgtgtcaaaagccttcaacatttcattccaaatggtctcagttgaatctaagccagtatcttgcgcgaggtagcccagtgtggcttgtttgttctttatcacttgtcccacatctggcgcttcgatattggcgattatttttaataatgtcgatttgcccgcaccatttcgtccaactaaaccgattcttgctttactagcaacttcaagatgaatattttcaaataaagtgtcggcaccaaaatagcgagcaatttgatttgcttgtaataaaatcattggataatcttccttaaatttatttttccgaatggatttagtctaccatatttttgaagtcgttgcgattggaagcgaccatttcaataaatcgtgattttttcacaaaatttcgagcaagtgcgttgcaatttcacagagattcttgctattatagttcagtagtcaacatttacgaaatttttttataaaggagagttattgtgaaagaacattcaattccaaaagcgactgttaaacgattgccgttgtattatcggtatttgcgtattttaaataatgctggaaaaaccaaagtatcatctacagaactaagtgaggcgatccaggtcgatagtgcaacgattcgccgtgacttttcttatttcggagaacttggcaaacgtggatatggatacgacgttgaagacttgatgcatttcttcgggaaaatcttgaatgatgaccaactgaccaacgtagcattggttggggtcggtaatttaggaagcgccttgttgaaattcaaattccatcaaagcaatagtatccgtgtcagctgtgcctttgatgtcaaagaagacattgtaggccgtatcgtggatggaatccccgtttatccattagacaatatggtggagcaaatcaaattacagcaaatcgagatcgcaatcttgactttgccggcacaacaagcgcaacaagtggttgatcaattggctgatgcaggaatcaagggaatcttgaactttactgctgctcgtctaactgcgccggatgatgtcatcattcaaagcgtagacttgaccaacgaattacaaaccttaatctatttcttgcatcataataatgacagcaagtaaaaaagactgagcgcgagctcagtctccgactatagatacagtccgatttgtggatgatatctatagtcttttttgcgtttataaaaaaatgtttatagctcgtcgaacagcgcttgataatcgatttgttcttcctctttgggcaactgctgcaatagattttccaatgtatgaaaatcaataaaacgagcttgccgcccaacttctttgccctcgtgatagactaagaccgctgggactgtcaaaacttcaaagaagcccgctaactcaggctcgtgcataatatccaaatgatagaatggaacatcatagctttcggcaaggttccttacttttggttcatccacatgacaaatactgcacgtttctgaagaaataaatacgatattattggtgttgttcgtgatggcttgtttgacgttcttcaatgactccaatgaaattccccccattccgttattaaaaaaaatctatttaccaaatatatggaatcaatcgatatttggtcttttttgtgtactccgagtagccaggtagttcattgatcagtaaagcttcttcgtttctaatccgtaaaactaaacctactgggaacagcagcataggaaatacagcaactactgaacctaaaacaataggcatcgataaaaataaaagtaaggaggcagtgtacataggatggcgaattactgcatacaaccctgtatctataactgcttgatttgcctcaactttaacaacacgtgcagcgtaggaattttggatcatcaccagtgcatacatagcatagcctgaaatcataatgaaaagaccaatcaatgaaacatttactgaaagctgtgtccattcaaaacgtcgatccaacccagcaaggctgaaggaaagaataaacgaaagtcctatgaatcccacatatcttttttgagaattttctacttcttttccattgagtcgtttttccaacaaagttgggttttttctataaagaaaaccgcccattgaaatcatcaaaatcgctaaagtcagaagaaaaatccatgcattccaataataataggttcctgcagtgccgaataatagcaatcctaagagtataaaaccacaaaacatttttatacttccacgcaaaagtagctttcccttcttcatcggtcattccccacgatctgaattagatttcttactttgattatctaatgcgtaaatttgagtgtcaaccatgtaacagaagatatagaacaagcagttagcgtaaggatagtcagtattggtcaaaatgtcaattttattgtctggaagaaatagttgtttgattgaataaaaagcgttatactctcttatgtactgcgggtgtagtttagtggtaaaacagaagcttcccaagcttccgtcgcgagttcgattctcgtcacccgcttagtctaaaaaccttgatgtatcaaggttttttctttttgtcttgatttgttgatatcattgggtatcagcaattatcaagcccgtctaaactattatctaaactactttttggattcagtcatctcagcgaatgcttgtatagcagggattgagacgattgaatcctttttttatttctagactctaaactatttagcttagagcgttcgctaagagattaatcgagtctattttctcttcttgataaactcctgcgtaggtatctaacgtcattgaaacactggagtgccctagcagctctgaaacggttttaaaattaataccttgtccaattagaattgttgcaaaagtgtgtcggagtgcgtgaggacttagtttaggaattccagcatgctttgagattctgtgtaaccaaagtcttggatgtgacagttggatgggttcgcctttttcatcacaaaagacaaactgtttcccatcaaagatattgacacctaattttagacactcctctttctgaatcagacgccactttttcaagatagaaattgtctcatcggttaacgggatttttcttctagacttcttagtttttggttcctcaagatattgccttctgtttttcccacgagtcaaagtctgttttatggtaagtactttttcatcaaaattgatgcaatcccattgcaaacccaaaatctcaccttgtctacaacctgtattcgcaagcaagaaaaagaatgtatagatttgaaaaggttcgttattttttgcatattccaataactttttaagctcgtctttagtataaaagtttatttccttttcttgaaggttctttttctttcttggcatgacaattttttttgctggattttcggatacataaccttgcttaatagcaaaatcaaaaatccgagagacgtttgaaacatactctttaaattgagtattcttttctctcatggtattggcaaatttttgaatatcggatactcgtatttttttgatttctttctctccaaaagttggcaaaatatgagtgtcaaatttttgcttaagttttacaaaacttgactctttcacggtaagctcgtacgtctctaaccatagttcatagatttccttaaatgttgcatctttgtgattttgaaacccattttttaaaatgtcatacgaaacttgacgataataagctttagcagctttctgagtgagaaagcctcctttattaatgttaacttgcttctttgtctcgggatttactccaagatatcccgtcactcgccataaatttgctccattgcttttttgatattgtgtgtatgttggcatttttttctccttctcatgtgtggggcacataggaaaggaatgaactttcgttacttgttctgttgtgcttcttgaatgaaggctaagtcttttgcagttttctcgatttcttcaaacgggaggttgtcaaagaagactggtttcatctctggtttcccatgacgatccaaaattggattgccgtcttcatccaaacgcatttgtggggtaaagaaacgttggataaaggcgagtttctctgctacctcgtctatttctttcactgtatggctattcaaaattttcgccaaagtaaacaagttttgaactttttgatcgtactcgtcgatgcgatcaagaataaccgttgtttcagagaccgcaatctcttttggtgaaccaaagagttgaatcggtgtcgcatgaaagaccgtcgcaaatttttctaagctctcaaaggtcgggtagcgaattccccgttcgatattggagatggtttgtttttgtacaccaatcttttctgctaattccgtttgggaaagtcccatttcttttcgtaaacgagcgacattgccgccaaagttttctatcattttcctcacctcgggtctatcataagcgctttctctaaaaaattcaagtaaaaaataaactaaatagtatttcaagtaaacttttaaaatatacttgacatctattttagatcgcggtagagtgtacgaaaagatactattttatttatttatagttcttttagttttaaaaagaaaatgtaaggaggtgaaaagaatgtcggtattggaacaagcgctcctggattggcaaaaagatcagaccaatcaattctttgccctgttagaaacccgcttggaagaaacacagacccagcaggatatcgtcaaacaaaaatattgtgcggcgcattttgatgtgagtgttaatacattgaaagaatgggttcttcagggctgtccagaaattcgattggactcaggtatggttttatacagcattcaggcggtgagaagatggttattaacctatcaaaactaaacaaaggtgtggggccaaggaaaggaaccggtgtcgggttggggtggttgccgcagccgttgcctcgtctgcgatggctgaaagccaatcggcaggcgaggcttacggacgcgtggaacgcacaggtcttttgcgaacaccagataccggcttaggataaggtgcctttctaatagcaccttataaagagaaaaataatggctaataactaccggaaaaatgcaaaaaaagccgatactaccaagctttttcacaacaaaaataatttgcgaacaagcgcaaattttaaaggaggtgaccaaatgaccaaaagtacccagaatgtgctaggaaaagtagactggtttcaagccgtcttgcatcaagtcagttatcagacggtctttcaagacttattaaaaatcagtttagaatccgtctcgattcaagcaggcagtttaaaacatgaagaatacgatactgtgtacacctgtggttttctcaaatactacacctatcatcagccagaaaaggccaaagaacgcggaacccttgtcttaagcgggcaagcctgtaccacctatgaatggattttgctttcgtataaccccaaggcgaatgtctttcaagaactcgccacccgtttttacgagtatgctagtcaaaccgccttcacctttgaaatcaagcggctagatttagccttagatgattacaatgaagtgccctacttcacggtagaacaactccacaataagttgaaacggaagcgattcctttcaaaaggacgaagctatcaactccatgacagcgagtttgatgccaaacaacgggcaaaaacggttagtatcggcgttcgaggatcggcttgtatgtttcgtgcctacgacaaagccaaagaaatggccaaagattttgatggagtgaaacaagaggaaattctggctcgggctccccaaattcggttggaagtcgaaacacgaaatgacgtggcagatagtctctttcgaaccattgcttttttaccgcaagatcaatatatcgcaaacttaattcgaggatttctacaaacggaacttaccttttacaccgacggctccttaaagcaggtctgtcgttggtggcaggactacctaaaaccaagtctagttcccactatcacccggcaatatcaagtgagtagctttgaccgttccttgaactggtatgaatacggtggacccatggcattaactcaggcactctttttcttgcatcatgagggtgtcgggattgacccaagtttgttagagattcgtcccaattatgaatggacacccgaactttctgatcgcatgattcaatacgtcagtgagcaacaacgtcccgatttgattccacttattcaagaacgcaccaaaaaagcgtccgtcacttcccaataagtgaacgaacgctctgttaaaaaattttctaaagcaagtatagcaaagaaaggaagaatatacgatgccaaaaatgttaagtattaatgattttgatttcggagccattggcccaacctttgaactagatgaggtcactccgaaatttgcgactgaaactcgaaccgatgaaaacggacaggtcattctagatcgcgaaaaccaaccaagaaacttctataccgatgagattatcgggtacaaatattcggtgactatcctagagggacaattccgtaaaaaagcaacgcaagtcaccgtcaataccttagaccatccgattgacaatgatgagattatgaagcgcgagagtgtcaaatgtcgatttgagaacttacaaccaagtagacctgggcacccgatgtattataaggcagataagattgttttgttagggaatcagaaataaaaaagtaaggagagcacactaatctgctctccttattcttcggttgaacggaaaaagagactgtgacgaacacctttggcgcaagcgtctaaaaagtacaatcccaaaatcattctcggtagactcctcaaaataactttctggaagatttagttgtaattagagtaggccagatacttcctacacgacttttgacatgataactctattctacacaagattcagattaattcctcattttggttcaggaccgcacttcctatctcaatttgtcacaaccaaataccttttctttaatgatttaattgtttcatctaacactgacagatcttgtgtgacctttaataatacaatacctccttgaatctgagcaataattgatctcgcttcaatttgagattcctcaaaactcaacgaactaaaagaaagtaaatttttagctaaagaaataatccactcattcataaaatcatttagtaaatcacgaaagtcctcatcctccagtgataattcgacaattaaatttcccattggacatccataataacgattctgatctttatgaaatgaataaacccaatccaacattgcttcaaaatcatgttgaggatttaaactgggagccaatatatcatcgaacagctcattttgccaagacttaacgttttcacggattacttctataccaatactttttttagaatcaaaatagtaatacaattgtcccttacctgcatccgctgctgctaaaatatcccgaatagaagtattgttataaccttttttataaattaaattgcgtgccgccgaaattatcttttccttcgttcccaaaatagtgttctcctcttttgtttaaagtatggcaagtctagcaactgaggatattattgtcaagattgctataaatcacttcaaattttgaattgagaacctctctttctttattcctattttaatacgtcatttaaagattcgctcatagttgggtgtgtgtaaatagtatcacgtagcattgtatatgggaggttagccttaatagctaaggcaatcaaattaattacttcatgagattcctctgcataaatagttgcccctaatatctgttcagttttaggatctactaaaattttaaaaacacctctcgcatcttcaagtacttgtgctttaggtactccagcagccattaacttaaatattttatagtcgatattccttttttgggcttctttttctgttaacccaacgttagacaatggcggtgtaataaatacactataaggaacaactactctgtctgaaacttttcgttcttcttccccaaacaattgacttaaaataatgcgataatcgtccaaagaaatataagtaaattgtaatccacctttaacatctccaatagcccaaacatcgtcagcagtggttcttaaaaaatcatcaactactatagcaccgcgatcagttacctgaatacttgtattttctaaacctagctccgatgtatttggcttcctccctgtagctgctagaactttgtttgctttgacgattttcttctcgccgttttcggtataagttacttcggcaaaatccgcatgatctttcactttatcaatagaaacacctaaatggaattcaataccagcctcaactaaatcattatagatcaattctgaaacatcatcgtcttctctagaaataaaatcagtactagcatccaaaacagtcaccttactaccatagctgttaaacatagaggcaaattctaacccaatatatccagcacctatgataacaagattgcctggcaacttctcctgatccattgcactagtagagtctagcaaataagtactttccctcaatcctactattggaggaatgactggaacagctccagtgttaataaagattctttcaccttcaacttgttttattgaaccatcgggcaaagtcacttccagaatgtgatcagcaacaaacttagcagttccatctaacacttctcccgttgcttcatctgagatcatatgataattcttatttctcagcataccaatcaatttctctttatgttctatagcagtgctgaagctcatttttttttcaccatttaaaattaatgacttggatgggatacagccaatattaatacaagttccaccatacattctcttagatttttcgattactaatacggattgacctttagctgttaatgtttttgcgagtgtttttcctcccttaccaaagccaacgataatattttcatacttattcatacaaaccctccatttttctgtaccaatcggtaggtactgaattaattgtattatattagagataaataagtaaaatcatttgcttatgcgctattgttcttttacataatacacagatagatagtattagctcattaaaatgagtttataaaataattgaatgaatttttttgatttccgaagtaattcgccaccaagtagaatttcaaaagaaatctttattgtgatgtagccaaatggggacaccaacaatcaacaacgaagtcacgttatttaagcggattatttttgattatcaaaattttatcgttttctttcacacatgaagctatttacagtaaggattgatatttcaaattttaaacatttgagaataataatgaagcacttgttatatcaatagtgcttcagtagagggactatatcatcagatgttaaatattcagctagtaacaatataaaacttgattatttttataactgtgaaaagggacttattaatttagcttcattcttttcctatataccccacaccttttttgtctttatgaacctaaactattatctaaactagccagtattggtatagtaaaaatactgatagagcaaggatttgagagccatgctgttaacacagaagcttcccaagcttccgtcgcgagttcgattctcgtcacccgcttagtcttacaaagcttgatttaccgccgtttgtagaggatggcggtatttttttgtcctctgtcagcttcatgcgaatctagtgttagccaataaatcgatcgcgttctttcttctctttataaataactgtatagatatcgagagttttatcattagtcgaagggctgagaagattgtttttaagagtccacagcttcactattaagtatgattgtatgtgtgtcatacagagctaaggtcttttttgtatatcatttccccaaacaagtaatttcctttatactcaattaaaggaggcgttttcaatggaagacaattatggaaaaattttagttgctattgatgactctgaacaatcgtataaggccctaaaggaagcactcgcaatcgctcgacgaaacgactctcagctgtatattttaacggttactgatatgtctattgcaatagctgatgcacgtattgttcagtatatgcgggaattagcagatgaacaatcaaagaaagttactgagaagatagaacagcatttaccatcagacattaattacacgatccgtaaagtagaaggaacgccaaaagtttcaattgtgcaatttgcgaaagaaacaggaattgatttgattgctatgggagcgacaggtaaaggagcaattgagagaactttagtgggttctaccacatcttacgttgttagtcacgcaccctgcaatgttttagttgtaaagtaagactgtttcagttttcatgggtggattttgcaagaaatgaaatgtcacgtgatagattcctcagttgtaaataaaagggggcatttacagtggtctcaccaaaaaaagttaccagtcccaaagaaaaacttgaactattacatgttatagaagatggtaccaaaacgggtaaaggttactccatagcaaagttaagatggaaaaacacagaagcatatggcatacggtatgatggtgataacgaagaagataaaggctttcctactacaggaagagggtatcaagctgcatggttcatcttgcctgaagcagtggcgtatccttatttaaaatctttaattgtgcaaagagatatcgattctcgaattgattctttgataaccgataatagtgaataaacgatacatttagcaccttctttatggttatgaagaagattgctgaggttgtgatagtagaatcccaacatagatcgttctagtagctgttgatgtttcaagcagtccttccttcacgtattacgtatggattgttcgtagaaagaataattccttaaaaagcatccaaaaaaattatgtgacgttctgcttattcgcacaaattatttgattttgtcgaaaattgattagaagtccgtcatctgcatagacggataagacatcgtagcttttgattagctgcggtgtttttatttttggtatttattacttttcttttaatgtactcttgctattcaatctatggttgatgtatgctaaaggtgttgcgggagggaacttccgtttagggtattatatcctgatgaaaccaacgtttgtggctgagcgttggtttttttgtattactgtgaaagcggattatgcgaaaaagaatattttgggtttcttttcgatttaaaagaaatagttctttaatgaaggaatttattttgtttaaaaatagtgtttttggtatttgaatttactagagttccattgaacctaggcatatactatgtgctaatcacgaagggagggaaggaaaatgatttttgaaagagtttttcgttgggtgattcgaatcagttttataatctcaatagtgctttattgtttaggaatttttttctattcccgattaccagctgaagttccgatccaatttggatttgacggaggcgtgaatagctggggcagcaaaatgactgtctttctttttcctacacttttattaggtgtcacattcactactcgcagtaaatatgttgacgcgaaatatccagtcatgactagggagaatcgtttacacaaaatagcattaataggctgtttattgctggtttggggagtaggaatctatttgtttttcatttacgcagcgttactagaataaaaaaatcctcgcgaggaggattacactttgataccaaataagctaagtattaatagtagaagcgccggtaacatagcgttcatcgtatttagcatccaatgaaccataatggggctccaaatgttttttgaaaacagataaatcaaccccaaataaacgcctaacaccatataaggaatcatggcatagatattgccattaaaattattccaatgtatgagaccaaataaaattccttgaacgaatagcataattagacgtaatgccctattcgtcacttttcccagcaataagtagcggaaggtaagctcttctgcaaaaggagcgaggaacggtgctactgtagccagaacggcccagcttggactaagtatttgcgcagaatcgctgtttgaagaaggaagttcaagtagttggctaggaatcaatccacgaacaacccgcagcaataaaaacgtacctgctaccaagacgatgctcaataacaatctgcgaaaaagtttttgacggtataagtgccattctgcttttaaaaaatcaccgaacagataaatcattactaaaaatccagctaaaaaaagtaaggtagacgctatcagtccaacctttggattatttgttaagtgaaagagcggaaaaagatagtttccgatcaataattctaaaggaatgacgaaaagacctaaccattgttttttacttctaagcatttttatcccccattctttcctaagtttaaaaaaataggtgagatgtgtaaagcaatatgaaataaagaaaaatatgtttgtgaagattttggtatactagagtgaaggagggagattgtgttggattatcaaatgcagaaaacaatggggaaatgttttcgcagcaaaggaaacagcattactgggctcatcagaatttttggtagttggtatgactacaaggtgattaatggatcgcccgagcttggtgatatgctggaggttatcgactttaccagtcgagagttgttagtcgttatcaataataaattagaagaaagtgatgtgaattatattgttaatatttaatatcatcttaattgtacttgcgatcattgttctcttattcatcgtcagtcaaatggtcgtgatcgtgcagcagggggaagtaaaagtggtcgagagtttcggtaaatatgtaaaaacgctggaaccagggctgcattttttgattccaatcttatatgttgttcgtcgtcgggtttcattaaagcaaacaccgatccaaatcgaaccacaaagtgtgatcacgcgtgataacgtaatcgttgaaatcgatgaagcaattaagtatcacgtgacagatgcccgggcttttgtgtatgataatgaggattctgtcacgtcaatgatccaagattgccaatccaacttacgaggtattatcggtaagatggaactgaatgaagtattaaacggaacggaagaaattaacgtaaatctttacgaaagcgtgaaggacattacagctggatatggtttatcaatcgaccgaatcaacatcggtgagatttcagtctcaaatgaaatcgtcaattcaatgaataaattgattacagccagccgcgataaagaatcattgattacgatttccgaagggaaaaaacaatcagtgatcttagaatcagaagcgaaatcatctgaaatgcagattgatgcggaagcgcgtgcgagacaaacaaagatcgatgcagatgctcgagcagaacgtacaagaatcgatgctgcagcagaagcagaccggatcgccaagctgactgaagcagaaacagctcgaatcagagaaatcaataaggcaattgctgaaagcaacttaacagatgaaatgatcgcctaccttgggattgaagccttcaaacacgtagtggaaaataatggcaacactgtcattatgccaagtaatttgactgagcttggcaatgttccggcaatcaaagaaatttggcagcaaaccaaatagtaggatcagcgtgatggaaaaaagattctataggagttgaataaccatcgcagcaaagagacaagcacccaaaatagtttcggcagttgttgtactattagcggggatttatggcgtttattcgcaactaaagccagataatgagcagagcaacacaataaaagaagtaacagtcagtcagttatcagaggttccagattatgacgggcaacatcaaacgatcgaactgaatcacaatcgtcccaattttactacaaaagatctttcgttggagcagggagcatggactagattttctgacttagatcagctgaatcgtgtcggtactgcaaatgcaatgctgggaaaagagataatgccccatcaagagcgggagcgtttatacgtaaaaccgactggctggagacaaaaattttataatgatgagcctttgtataatcgggcgcatttaattgcttatcagttttctggagagaataataatctaaaaaatttaatgactggaacggcttcactgaacgatcctggcatgaatgatcatgaaaaagaaattggcaactatattcgaaaaaccaatcatcacgtacgttatcgtgtgacgcccttctttaagggggaggaattagtcgctcggggtgtgcaaatggaagcacaaagcattgaagacgaccagatttcattcaatctctttatctacaatgttcaagatggcattaaaattgattatcaaaatggatactcgcaaaaggaataagaaagaaagctatccgtgttggatggcttcttttttgaaaaaagagcactgtgtgacaagcgtaagattctgaaattgggtaaaatctatagtaactatcaataaatggaagaaagcgggtgttaccatgcaatggcacgaggtatttcatggcgatcaggaaccgacagaacaacaaattaaagattttattgcgactcctctttggcaggacttgtcagatcatttaacgcagacttaccggataaaaccaaaaaaaacctatagcagatgctcaatgggagatggatattggatgggctggaatataaaatttcaaaagagcggaaaatcattgtgtacagtctacccaaaacaaggtttttttgtagctatgatttcctttagtgctaaggagttagatgacgcagatgtgttgatccaaatgtgtgaggactacacgaaggagaaataccaagaggctaaagctagtaagcttggcaaatcaatttcttttgaggtaacgaatgaaagaattttagcggatatcaaagaattagctgctttccgcgcaccatcaacgaaaaaaatacgatcatcaattgcctaagaattttcttgggctttttgtttgcgattgcgctaaccttcaaaatccgagaaaatgaaaagaagaaattcgaggaggagactaatggaagagtaccagaaagaacgatacacagtcgcagcgatgacgcttagcaaaaaactaatacgaagaaactttcatcctattatttgtgaaaatctagaagaagctagagcccaggctttggaattgattgatccaaaaaagtcagtcggttttgggggttcaatcacagttgaacaatctggaattattgaagcactgtacagtcgaaatcaaaaaatgattgatcgtgaaaaaacaactacgttagaagaacgacagcaagtgatgaaacaagtattaacggccgattatttcttaacgagtatcaatggaataacggaagagggcgagttagtgaatgttgacagtgtgggaaaccgagttgcggcaattacttatggacctaataaagtccccgcttttgttagtattaaaaaaaatgtatggagatttagcgacaacactcgaaatagtacgtaaaaatactgcaccattaaatgcgcaccgtttaggattgaaaaagacaccttgtatccaaaagggaatatgtggagactgtttacaaatggaatgcatttgcaatacgatcgcaattacgcgacgttcaatgatgaaggatcggatttttatctatttaattattgatgatgtgggtttgtagctgattggaatgaaaatgaagaagcaaacaaaaaaacaaccggataattcattctccggttgttttcttaatagtctagcttaatgaactactattttccattacttcatcgattaagccataagctttggcttcttcggcagtcataaagttgtcgcgatctgtgtcacgttcgatgacttcgatgggttgtccagtccgttcagccaagatattattcaaacgttcgcgtgttttcaagatatggcgagccgcaatttcaatttcagtagcttgaccttgcgcaccacctagaggttggtgaatcatgatttcagcatttggcaaagcgaaacgtttccccttcgcgccagcggtcaataggaagcttcccattgaagctgccataccaagtacgatggtttgaacgtcagctttaacaaagttcatggtatcaaaaatggctaagccagcagatacgctaccacctggagagttaatgtaaagataaatatccttttcagaatcttgggcatccaagaaaagtaattgggcgataatagtgttcgccatatcatcgtttacctcaccgctcaacatgatgatgcggtcttttaataaacgggaataaatgtcgtaagcacgttcgccacgagatgattgttcaatgactgtaggcactaaattcatagtgaatcctccttaaaatagtattcgtaaattagtttagcacaaacgaggttggattgctaaaacataaagaaagtatacaacgttggtcagttttggtcaaatagaaggcttcgtttttttaaacggctcaaactatcctagaaacatgaaaatatggtactattaatagcgcagacaagcggatatcattttcacttttccaaagttcgagaaagtaacattttggtggaaagatatatggactgagaactggttttatttgaaaaaataattccactaatattatgaaacaggagggaaaaaatgtggaaatcgcatttattggactaatcggcgtattgattggagcaggtattacagggattgctgttttctttgtttttaagtatattgatctacgccataaacgggaaagagagctggagcatcaagtcaaagaaattgagacaattaatctcttgaataaaaaaatcaacgaaattctatctaaacggaatgttttgatgcaagattatgtatcatttaattcatttgacgattgttacatcaccatagacgatttcatttacttgaattcttttaccgcacaaaataatttttatttaccaaattatttgattgaggaattctttaaaaatatttcgcatcgaaaagttattttatctcctgaagaaacggtcaaaatcggcggctacacttataagggcggacggatcgttatggaaactttttctgaacaattgattgaaattttagacgagaaaagacaaaagctatctcgttcaacgaaacaacccttaagttatttcaaagcgcaatagtgtttttcataaaacataaaacaaatttaaatcagattatttttataataatttgtaactacggacgaggtgatactagatgacagtaattatcgctcatcgcgggagtgcagggactcatccagagaatacgttgcctgcgttcatggaggcagtacgatcaggtgcggatgggatagagctggatgtgcatctaacggcagaccagcaattagtagttatccatgatgagagcgttgatcgcacaacaaatggtaagggtttgattcgtgaattaacactagaagaaatcaagaaattagatgccggcagctggtttgataaaaaatatcaagcgactaaaatatcgacactgcaagaggtattgaatttactattacaaatgcggtttcggggctttttatgcattgagattaagactaataaatttcactatccaggaattgaggaaaaaatttctcaagtcatgactagcaaggaatggccatttacttattggtatgccagcttcaattatgattctttacggattatgcacgagtatgaaccagatgcacagtatgatttgattcaaaaaaatgatttagaaaaataccaaattgttttggacagtaattttattgaagggcttcatccaagttctgattgggtaaaacagcatccggagattgtcaaaaacttcaaaaagtcgattcgaccttggacacccaacttatacgaaacgctgatgatgtgttttgaaaacaatttagctggtgtcattactgattttccagaaaaagctattcgaacgagaagcaggttcaagcaatgaaagtgatcgcaattgtagggccaacagctgttggaaaaacgagtttaagtatcgaattagcaaagcaattcaacggagaaattatcagtggtgattctatgcaggtttatcgcggattagacattggcaccgctaaagttacagctgaagagatggagggaattccccatcatttgattgatgtacgtgatgttgacgaaagctattctgcggcggattttcaaaaagccgccagaaaagcgattcaagaaattagcgaccgtggaaaattgccaattattgttggcgggacgggtctttatatacagtccttgctatgggattataagcttggcaatgaaggtgagcttgaggatgattcccttcgtgcgaagtatgaagcttttgccgaagaaaatggaaatctggccttatgggaaaagttacagctaaccgatccattggccgctgagaagatccactgcaataatcgtaagaaaatgattcgagcattagaggttttcgagttaaccggacattcaattttagaaccgaaggaacagccgaaggaactttatgatagttttctgatcggtttaaatactgaccggtcgattttgtatcaacggatcaatcaacgcgtggatctcatggtagaacaggggctgttagcagaagccaagaatttagcaaaaaatccaactgttcaagctgcgcaggggattggctataaggaattttttccttatttatcgggcggttcttcattggaagcggcgctggaagaagtaaagctacattcaagacgttatgctaagcgccaactgacttggtttcgcaatcgtatgtccgttcgttggtatgacttgattcaacagccggaaaaaattgatgagatcaaaacagagattgctacttggttggcaaaagacaatccaatttctaatgagaaataagcaataatgggttgattcataggaagcattcagagcaagactttttcattttgaaaaatatcgtattactaattaggaggaaacggtttgtcagaaagagtcatattagtcggcgtcgagacagacgagagtaaatataattatttagaatcaatgcatgagttggccggactaaccaaaacagctcatggtgaaattgttttttcattaactcaaaagcgtcctaaagtagatcggcaaacgattattggaaaaggaaaattggaagaactggcgcaactggtggatgcgcatgaggctgaattagtgatttttaatcattccttatctcctagacagagtcaaacaatcgaagcgcaggtaggtgtcccagtaattgatcgtatccaactgattttagacatcttcgctcagcgggctcgttcaaaggaaggaaagctgcaagttgagttggctcagctagactatttattaccgcgattagtaggacaggggcaaagcttatctcgtcttggcggcgggattggaacgcgtggacctggggaaacaaagctggaaacagatcgtcgtcacattcgtcgtcgtattaccgcgataaaaaaagagttaaaagaagtcgaagctcaccgtgaacggagtcgccaaaaacgtcaacaatctagtattttccagatgggtttgatcggttatacgaacgctggtaaatcgactattttaaacttgttgacgaatgctgacacgtattctgaagataagttgtttgcgaccttagatccattaacgaagcgttggcatttgcctcaagggatggagactacgatcacagatacggttggctttattcaagacttgccgacacaattagttgatgcttttcaatcgactttagaagaaagcaagggaatggatcttctattgcatattgtagatgctagtgcggaagatcgtcagcagcaggaaaagacagtgattgatttattgaaggaacttgaaatggatgatattcccatgctgacgatatacaacaaagccgatcgaatcgatgaattttcttttgcgccgactttattcccaagcgtgttgatttctgcgaagaccaacaaaggcaaggaactattagctgaggcgatcaaacgtgaaattatgaatctactggaaccctatatactgactttgaatgcagatgaggggcaggctttgagcgaaatgaaacgagagactcttgttctaagtgaaaactttgatgaagaaaatgagcagtatatcattcgaggatttgcgaagaaaaaatctctttggattaggagaatggaagatgaactggacgactaagctagcaccagagctggttgagaaaattgatcaaatcgatcaaaaaattgcaaaacggctacaagaagtacgagaaattgctttgtcgaatcaggcaaaagtattaacggcttttcgtgagaatcatgtgtcggaaagtcattttctgccctcaactggttatggaaatgatgatctaggacgagatgttttggagtctgtttatgcgcagacattcggtgctgaagctgccttagttcgtcctcaaattgtttcgggaacccacgcaattgcaacctcgctatttggtgtgctgcgtcctggtgatgatttattgtatatcacggggactccttatgacacgttattagaggttattggcattcaaggcaatggcatcggatcatttaaggaatacaatattggttacgaaaaggtagatcttttagaagatggaaatgtcaattttgccagtgtaaaggaaaagattaccgacaaaacgaaagtggtggcgattcaacgctcacgcgggtatgcttcacgtccatcctttaccattgaaaaaatcaaagagatgtgtgattttgtcaaaagtattgcgccaaatatcgtaatttttgtagataattgctacggtgaatttgcggagctattggaacctacccaagttggtgcggatcttatggcgggttctttgattaaaaatcctggtggtggaattgctaaaactggtggctatattgctgggaaacaagcgctaattgagcgatgtgcttatcgtttaaccactcctggcgtaggtgccgaaggaggggctatgttgggcagcgtctttgatatgctgcagggcttttttttagcaccgcatgtcgtgagtcaagcgattcaaggggcgattttctcttcggcgttgttagctgaatatcagttggaatcgacacccaaatgggatcaaccacgaacggatttgatccagttaattgattttcgtgatcgtgaaaagatgattcaattctgccaagcaatccaaaaatattcgccaattgatgcgtatgttgccccgataccttcttatatggcaggctatgaggatgacattatcatggctgcaggaacgtttattcaaggagcaagcattgagttaagtgcagacggaccattaagagaaccttattcactctacttacagggtggtttaactttcgaacatgttaaagtcgcagtgaccaatgctgtaaatgaagtttatcatgaatcataaaaccgaagtcctagcgatttcggtttttttatatggaagtcaattccaatgctttctccacaaaaaataatttttgatcatggttaaaataaactaaataggtatggttctccataaagtaatcatagatgagaccgatatagccagccatcggatatccttttttaattttgacgcacgtaccgatgtcaaatttttgcacttttctcccagtctcctttttttgatcagtatatcaaaaaaaactgttctttaaaaaggttgatatactgcactttttccgcaaaaagcgaacattactaaattctatgtaagaaaatctaacattagcccttgacgattggtctatcgggtggtattctttttccaacatcaaaaaacaaggaggagatgttatgcgggaaaaagaattgcgacgttcgcttgctgtttttccaattggtacagttatgaagttaacagatttgactgcaagacagatacggtactatgaggagcaagaattgatccacccagaacgaagtgaaggtaaccgtaggatgtattctctaaatgacattgatgtactgctagaaatcaaagattatttatctgatggacttaacatggcagggatcaagcgtgtctatcaaatgcgacaagaagaagtcaaagctgccaaagagaaaccaccattgactgataaagatgttcgtcgaattttttatgacgaaatgttaactcaaggcgggtttcaacaacaaaatccatatcaatcacaaggtcctaagctgtagtggttgtggaatataaaaaaatgaagtgcgaggaagggattagatattatgccgaaaaaagatctagctaaagaggatattaaacgaattgtagaagaagaaaatgtccgttttttacgtttgatgttcacagacatcatggggacaatcaaaaacgttgaagtaccagttagtcaaatggaaaaagtcctagataacaaaatgatgttcgacggttcatctattgaaggatttgtccgtattgaagaaagtgatatgtatctgtacccagatttatctacatggatgattttcccatgggaaagtgatcacggaaaagtcggtcgtttaatttgtgatatttacagtccagatggcactccgttcccaggcgatccgcgtggaaacttaaagcgcgtcctaaaaggaatggaagaatttggcttcacatcatttaatttgggacctgaaccagaattcttcttattcaaaatggatgaaaatggtgatcctacattggacttgaatgacaagggtggttacttcgattttgcgccaactgacttaggagaaaattgccgtcgcgatatcgtgttagagcttgaaagcttgggatttgaagtagaagcttctcaccatgaagtagctccgggacaacacgagattgatttcaaatacgcggatgctattgaagcttgtgacaatattcaaacattcaaattagtggttaaaacaattgctcgtaagcatggtctgcatgcgacatttatgccaaaacctctgtatggtattaatggttctggtatgcactgcaatatgtcactattcaatgacgaaggcaatgtcttctatgacgaagatggcccaatgaaattaagtaaaacagcgtaccaatttttagcaggtcttttaaaacacgcgcgtgcatacacggcagtatgtaatccaattgttaactcttataaacgtttagttcctggctttgaagctcctgtttatgtggcttggagcggacgtaatcgttctcctttaattcgtattcctgagtctcgcggtttatctacacgtttggaattacgttcagttgacccagctgctaatccatatttaacaatggcggttctgttagaagctggcttagatggtattcgcaatgacttgactccaccagcagcagttgatcgcaatatctatgtgatgactgaagaagaacgtaaagaagcagaaatttacgatttaccttcaacgatccacaatgcgatcaaagcactacgtgaggatcaaattatgattgatgccttaggaagtcatatctatacgaatttcaatgaagcaaaacgtatggaatgggcagctttccgtcaaactgtttcagaatgggaacgcgatcaatacttagagctttattaatcctaactcgcaatactcttgaggaactcctcaagagtttttttttatatccgaaaaaagaatcttataatgagcgccagctcttctcgtgtgggtttgatagaggtcaaatcaacaaagcagattctcgtacagtaacgtataataataagtagtagacagtatttatgtagaaaggagagtatctatgataaaaggaaataaaacaatactgaaggcggcgactttagcagatcgccagcgtgtatacgattggtgttttcaatcagaaacgaccaaatcccatagcggaccgccggattatcctgaaaaaaagattgcgacttttcaagagttttacgaagattattatgaggaatattattttaatggaacccgaccagagaagggccagggctttatcatcatgaatgatcaagaagctgtgggattcattagttattcggcttttcatttgaaaccacattctgcggagctggatatctggatgaaagatgaagcaaattgtggaaaaggctttggaaatgatgcaattctagccttgagtaattatttaaatcaacagttagccattaaacttctaattctcgcaccctccaataaaaatagtcgagcaattaaatcctatgaaaaatcaggtttcgagcgtacaaataaaatgatgtctgattttctttcaaaggactatcaatcgctttatggcgctggcgattatggtgtttcaggaacagcaatattgataaagtgctttgcaaagtaaaaaactcccgaacaaacggaagtcctttacgaaaagctaatttaaaatggccaatccaaaggaaagataggttgcataagcgatccaaatcagataaggaataaagcaaattgcagctcctttagatatgccgcgaaactcacgaatactgaaaataatcgttatcagaagaaaaagactgatgaatgatgcaatccagaagtgtgatccgccgaagaaaataatgctccaaataaaattaagcactagctgaataccaaaaagaaaatacgcgagcgttttactttttggctctttactgtcaatcacaagaaataacgctagaccaatcaacgcgtaaagtacagtccaaatgattccgacgatatttcctggcggtgctaaaaatggcttgtttagctgggcgtagatagcgggaatatcaccagcaaaaaatcctgatatagaacctattaattctacaccaatgatacaagcgagtagtttaaaaaatcgatttaacatggtttacctcctttattacttgaagtttgttgtactcaagtgtactctctacttattcagtataacgaggattatccttaaaagaaaaaaagatgcttaagaaaaacaatctaacttagtaaaagcatgttataataattcggaagattttctaaagccaagagattggcaacttgcaaaatttgtaagttttgtcttcttttagtaaaatgtaattgttgataattccaaggagaggtgtgagaaaatgggatacacagatgaaacagtccgttttgattttgatgacaatcgtaaaaaagagattagcgaaacattaacgattgtctacaatgctttagctgaaaaaggctataatccaatcaaccaaatcgtcggctatttattatcaggagatcctgcgtatattcctcgttatcaagatgcacgaaacttgattcgtcgtcacgagcgcgatgaagtgatggaagttttagtgaaatattacttgaaggatcatggtatagatattcgatgagagtaatgggattagatgtcggctcaaaaactgtcggaattgcggtcagcgatccatttggctggacggctcaaggagtcgagatcatccgaattgatgaagaaaaagggaagtttggctttgaacgcttaggtgaattggtcaaagaataccaagttactaagtttgtggtggggcttcctaaaaacatgaataattcgattggtcctagagcagaagcttcgatggtttacgccgaaaaaatcaaggaactttttgatttaccagtagaattccaggatgaacgactaacgacagtgcaagctgaacgaatgttggtggaacaagcggatgtctcgcgatcaaaaagaaaaaaagtaatcgacaaacttgctgcggtcatgattctacaaaattatcttgatcgaacgagtaacaaactttagaaaagaggaatagatatggcacatgaacacacacatgaccatgatcacgagcacgatcatgaccacgaacatgaagtaattactttagtggatgatgaaggaaatgaaacactctacgaaattcttttgacaattgatggtcaagaagaatttaatcgcaattatgtattgctttatccagcgggtgcgcctgaagatgaagatgttgaattgcaagcctatgcatatgttgaaaacgaagacggtagcgaaggcgaactacaacaaattgaaacagacgctgaatgggatatgattgaagaagtcttcaatacattcatggcagaagaagaatagagaaataagcggaatccagttaaaaaggattccgcttttataatacagaatttatttattttgtactatctccatcacaaagatgaggaggctgatagtaaaaaatgtcagtaggataaagtgaatgaatgtgaataaatttaattgctccctagctaaataagcacaaaatgaagcgatgaaatataaaaaccctaaagtaaccgtactctttagaatgtttttcagagatttcttcattcatccctcctctctttcaaaagattatgaacttagaacttgagtgtcaattatataattgtttattcttgcttaaatgataaatcaaaaggctctgtctggttgatttatttagaagatttagttggcaaaaagatagttttatactcggattctattattatttttatggaatataagcaaaaagactatataagctaatcatttgtcacccatcaaaggaaagcgtaacattagttttgtaaacgttatcactttggaggtaggaaatcagatggagaaaatttatcaagccagtacagcagaaggtgcaatcgattttataaatatgtttgatttagaagaagctgcaaaagaagtcataccaaaaggcggatatggttatataagcagcggtgccggagatatttttacgtatcaggaaaatgaaaaggcttttaatcataagctgataatccctcatgtattaagagatgttgaactgccggatacaaggacgaagtttgatggcgaggatttaacagctcctataattatggctccaatcgccgcacatggattggcaaatgtggcaggcgaacgagcttcagccaaaggtgttgcccgttttgggaccatttatacggctagttcctatgcctcttgtactttggaagaaatccgtgaagctggcggagaagatgcaccacaatggttccagttttatatgagtaaagataatggaatcaatcaagatattttatctatggctaagcgcaatggagcaaaagcaattgtgttgactgccgatgcaactgttggcggcaatcgtgaaacggatcggcgcaatggcttcacttttcctttagcaatgccgattgtccaaacgtatcaatcaggaattggacagacaatggatgcagtttatggctcatcaaaacaaaaattaagccctcaagatgtcgaatttattgccagctattctgatcttccggtttatgttaaaggagttcagtctgaagaagatgttgaaagagcacttggttcgggagcatcaggaatttgggtctccaaccatggtggacgtcaattagacggtgggccagcatcttttgattcattacaatatgttgccgaagcagtggcgggaagagcaccaatcgtttttgatagtggtgtacgccgcggtcagcatgtctttaaggcacttgcctcgggcgctgatttagttgcaattggtcgaccggtggtttatgggctggcgttaggcggttctactggtgtacagcaagtctttgatttcttcaaaaaggaattggaaatggtaatgcaattagccggtactcaaacagtagaggatattaaaaaaattgttttaagagagaatcgttatttatagaagaagtcgtttacatctataacttgcattttagatgtaaaattttctctgtgactaaatgataaatagccagtcggaagttcaaactcagtgacttcaataagttgcatagagtttttcaaacagtcgaaataggatagtttagaaatcctttcgaaaaatacacaataaaagcataatcgaatgttcttatttctatcaaacttggtagaataagaacatttttttatcgaaagggataccattatcctatctatttttgaaagatcaagttaatttcaaatagagtacattctaaaaataataaataaaatctgttatttaaagtttgttctattacacaatgttgagtagcttattctgtgttaatagctgtttttcataggcgctttactatatgttttggttttttgtatgttataaatgaggcatcgtttaattaacttattaaaaaagaagtggagatgacaacagtgagaaaatggttgatgggattaatggtgattacaacgggattcgttctaactgcatgtgggagcacacaatcaagtgaggatgatagctggaaaaaagttaaggataaaaatgaactgatagttgctacgtctgggacacttttcccgtcttcttattataatgatgaaaacgagttgagcggctatgatgtagatgtagcaaaggctgttgcaaagaaattagatttaaagatcaagtttaaggaatacaatgttgacgggcaggttaccgctgttaatcgcggagaagctgattttgcagcgaatgattttggtatgtcaaaggatcgggctgagaaattttcattatcttctcccattaaatattccttcgacagtatgatagttcgaaaaagcgatgattctggaattcattccttaaaggatttaaaaggtaaaaaagccgctggtgaacccaatacgagttatatgaaaattgccgataaatacggggcaaaagcagtgacctacgataacgctacaaatgatcaatacttgactgacgtagctaatggacgaacggacgtaattttgaatgactattacttgcaaaagatgtctctggcagctttaccagatattccagtaaaaattctagaagatgtttattttaatgcgaattctactggcttcctattcgataagaaaaatcaggtgttaaaaacaaaagtgaatactgcacttgaagagttgaagaaggatggaacgctaaaggaaatagctgaacagtatttcggtacggatgtttcaacaaaacctaagcaagaagtaactgaaaaggtctcggcggattaatgtatataccaactattgatttaagcctaatgttagaatcgattccttttttattaagtggattgggctatactattggaatcagtttggcggcatttttctttggtaatttgttaggtatacttatgaccattttaggatttgttccttttcgaatagtaaaactatttgttcgtttctatttatcttttttaagagggacgccagcattggttttactgtttttactttatttcggacttccatatcagctgaatgcagtagtagcggcgattatttgttttagttttaccagcagcgcttttattggtgaaatctatcgcgggtcgattgccggagtaaatgctggtcaatgggatgcagcttatgcactaggaaatcgtttctttcccacgatgcgttatatcattttgccacaagccttccggatttcaattccagctttgagtaacgtagcgatggacttgttaaaaggtacttcattagcggcaatgattacagtacctgatatttttcaaaaggcaaaaatcattggtggacgtacttttgattatttgtcgatgtatcttctagtagcattaatttactggctgctttgtgtggggatcggccatattcagcatcagctagagaattattttcagcaaaaatatattgtgtaattacatctttaatcaagcggggccttaaacggctccgcttttttatcgagctttatagataatattgataaacaacttaagaaattggataatagaggatgtaaataaatgatgtgaagaggatcataggatgacaaagaaaattattttaattgaagatgatgaaaatctccgtcgaggaatctccttttacctagagcaagaaggatacgaagttatagtaattaatcgtgttcaaggttcaatcgaaaagataagaaagaattcaccagacttaattattttagatgtcactttacctgacggaaatggctttgaactatgtcaggaaattcggaaattttcagctgttccaattttctttctgacggcacatgatttagagtcggatattctcacaggactctcgatcggcggagatgattacctaacgaagccattttcgttagcaattttaaaggcgaaagttgcgttggtttttaaaaagaaagaggatcagtcaaggaagattgagttaccgccttttatgcttaatttggatactcatcgtttgttcaaaaatggccaagagatccccatgagttcaacagaattccgactgattaattatttgatgaaaaatgctgggattgttttagaaaaagaagcgttgttagaaacattgtgggatgatcaaggaaaatttgttgatgagaatgcgctatcggttaatattcgtaggattcgagtaaagcttgaagaggatccaaaaaaaccaaaatatattgaaacggttcgaggggttggatacctctggaagcgaagggagtgattaagagtgctctatagcataacagttttattttctatatgcgtattattgatttttttcttccaaatgcgaaagcagcatgaaaaggaattatctactattgaaaaagttttagatagtgttataaagggagattttccgaaaaatgctgattcttaccaagaagggcaagaaagcaagttgattttcaaaacattacgaatcgcagaagcaaatcaactttatcaagaaacagctgcgcgcgaaaagcaacgtgttcaagaattaatggttgatgccgctcatcaaatgcggacacccatcacgagcatgctgatgttcacagaactattgcaaaataaacaattaccattaagtgagtcgcaagaattcttaagacgcttgtcttttgactctcaacgtctaaattggttggtagaagaatttttacacatgtcaaaattcgaaacggaatcgatggagttaacaaaggtgctccaaaatcttagtgagacaatccaacaagcaattcttcaaagcagtggagctgaggatgagcagaaacgttttgtagtaaaagatgcagatgttgaaattactcatgatataaaatggactcgtgaagcaattgggaatgtgttagaaaacgccataaagtacgcctataaagactcacaaatagagatatcggtcgatcgtctaatttcttatacaagaatttcaatcaaaaattttggaaaaaccatttctaaagaggaattacctcagctttttgcaaaatactatcgtgggtctcagtatcgaaatacgatcgaagggtttgggatcggtctttacttaacaaaattgatatgtgaggcacaaggaggctatgttttggcggattctcaagcagaacagacgacgatttctctattcttacagaactgacagatttgtttgcagcgactgacattttactgtaagggtcccttgctatagttaaagtatcaagaagggaggctgttggtatgaacgtagttaaaacgaatcatctaacaaaaacttatggtgaaggggaaaatcaggttcacgcagtcgataatgtaaatttgacaattgaagacaatgagtttgtgacgattgttgggacttccggatctggaaaaagtacattattaaatcttttgggaggtttagatcgaccaacctccggagaaattgaaatttctggaaagcaattgaagcatttaagcgaagaagaattaacgattttcagacgtagaaatgtcggctttgtttttcaacaatataatttagtgccgattctaagtgtttatgaaaatatcgtactgccaattcaattagatggtaatacagtagatgaaccctttgtcgatgaggtaatcagaacattaggtttaaaaggccgtgagagtcgcttaccgtcgatgctttcagggggacagcagcagcgagttgcgatcgctcgtgcattggcagccaaaccagcaattattttggcagatgaaccaacagggaatttagatagcaaaagtagtcaagatgttcttggtttattgaaacaatctgcaaagaaattcaatcaaactgttattatgatcactcataatgatcaaatcgctcaattggcagatcgagtaatccgtatcgaggatggcaaactttttgatgtgcagataacaggcggtgactggtcatgaaagaacagcgacaagcaattcataacttatggctaaatagtttcaaaagcaatcgaagacggaatttttttgttgtattagccctagcgctgacaacgttattaatttcatcagttattggtttagggatgagtttcattgaagcgagtaacaaacaaacggttcaacgagtaggaacgacagctgatgcaaatcttaatgatttaacgaaacagcaaattgatattttaaaaaaagacgcatcaattaaaacggttggtacacagcaaacaattggctctgttgatagtcagcgattaaagaactcaaagatacaaatggcattacattggtatgataaatcagaatggaatgggctaagaaaagaagcaatcaacgatttcactggtaaatttcctgagaaagaaaatgaaattatggcaccgctggcggcgttgaaggaattaggaattttaaaaccagaagcaggccagaaaatttatttgccgtgtttgattgatggaaaaaacgttaaaaaagaatttgttttatcaggttattataaagaatacgtgattgctcgagtcgttgattttagttacgtgttagtatctgatcaatttgcagaaaaatacggctcatcgaccagcagtaaaacgtattcgatcaagtataaggatagcaataacctaggacagcaaaataagaagcttgcgaaaaaattgaagcttagtgagacgcaagaaataaagacgacactgaaagagtctaaacaaagtgtaactacattgattttaggaatagggatgtttttagcaatcattttaatctcgggtggcttgttaatctataatgttttgtatatttcaattgccaatgacattcgtttttatggattattaaaagcattgggaacaacaaaaagacaattgcgcaaaatcattttttatcaatcaattctcttgtcagttattggtattccgattgggttaatcggtgggttcagtatttctcatgtgctgattccctttgttatgaaggccacaaatttttctgaagcaatagtggtatcgacccaaccaataatttattttggcgcaggtttgttcgctttgatgatcatgctgttgagttcgattaaaccagccaattatgctgctaaggtttcacctgtcttagcaatcaattttacggagtccaaggttaaaaaaggggatattcgttcaaaaaatggcggaaagctttatctaatggcttggagaaatatttttcgggataaaaaacgggctctgattgttattatctctatgaccttgggaatcacctcttttgtcgcggttaataccatcgtcaaaagtatggattttgaaaagtttgttttgagtgagatgaactatgacattatgattagtccaagccctacgaataccgataacaaagaatctgattcaaaaagaacagagaaggaacaggtgagtcagcaattagttcaattaataaataaaaatgaagatgtaacttcagcagatatttattattcagaaccggttttagtgaattatgacgaacaaaaattcgctccatatattcgttcttataatagctattttaagtatgcaaaaattgaacaaaaaaagattcagtcagatggttttagcggagatttaatcagcattgataccgatgagttggctaaactattggtaaaaaacaaagaaaaatcatttgatcaaacggcttttgaaaacggaaacattgcttacattcaatccgatcatccagaagatttttcacatattccagaaatacaattttctacaagtgataaacaaacacatcaggttaagattgctggttttgtgcctaacaattatttggagtttcagaccggcggtgctccagcaatgtttgtctcaaaacaatacttggataaaatttctcctcatgctagtttatggagtgctaacattaatataaataaaaaaacagctgatttgacctctgatcaatttcaacgttttattgatgaacaatccgtttatagaataatgacaaaaacagaaatgagaaatcgagcagttgaggaaattagcataatgaggatgatgggcaatacgttggctatagttttggccttgattggtttgttgaatttcgtcaatattattactactagtattttggcaagaagacaagaacttgcaactttagaaagtatcggtatgactcgtaagcaaacgaataaggttttaatgtttgaagggagttattatgcattgattgttggaggtctcgtgctgactttcggcctaggcattacctatgctttgtattcgattgttaaacgatcagctacatacgctagctttgatttgccaatagtagaaatcagtgtctcgttattactaatgctcatgatttgtttactgaccccatacttagtgatgaggtcttcgggaaagcgaagtttggccgaaagaatcaaagaataattctaaaaactcaagtatatgaaacattttgaatcttcaaaagtgtactattttgtaagtgttctatctgaatatccgatcagaagatgtgcacatattaaaaaattataacttaaaaacgagatgaagaaaggagctgtgacaaaagacttgtcatagcttctttttccgaataaacggtgttccagaagtagcttcttcggaaataagccgaaatttcacaaaaatttgagaaacaattttcggaaattccttcttatttcttgaagctgaccacttctgtcacaacctcttatttgtgaaggataatcgtctgtggctggtcttctagaagaatatttgtgataataaaataaaaaaaagaagaggtgtttgcggtgaaagatggattgtactgggcagaaaaattacgtaagaaagaagtcagttttcaggagctattaacgaattttgaggagaaagcacgtaaacaaaattcgatgcttaatgcttttgttactctgatgggcaatgaagcgcgagaagagcatcaaaaagataccgacctgttaaaacgtccattcgccggtttgccaatcccgctgaaaatgttaggtcaagagaaaaaaggttggttgagtacatcgggatctaagctactgagagaccatcgttcaagtcgcaacagtcatttcaccaataaactaatagaaaatggattggtgccatttgctcagactaatacgccagagtttggctttaaaaacatcaccgacgccgagctttatggtccggctaggaatccatggaatcttgattattactctggtggatcaagtggtggagccgccagtgctgttgcttccggtattgttccaatagcaggagctagtgatggaggcggctcaattcgtattcccgcttctttttgcggtctgattggcttgaaaccgactcgcggaacgatgcctgtagggccaagcggttggcgcggttggcaaggagcagcgattgatttcgcattaacagtttcgatgcgggacacggaaaaacttttttatggaatgcgtggaattgatagtgcagcaccgtatcaagctcctgaaaaagcatggagacatgaacaggcttcccaaaaaaagaaactaaaaattgcggtggttattgattctccaattcattcaaatgtatctcatgaggccgccagcgcagttgaaaaagcacatgattttttattaaaacaaggtcatcagatcgagatgatttcctatcctatagacggaaaagagctaatagcgagttattatatgatgaacggtgccgagacagccgccatgtttgctggaatcgagcaagggttaagacgtccggttgaaagaaatgacatggagctgatgacatggggaatttaccagtatggtaaaaaaattcctgctagtcactttattcatgctctgaatgtgtgggatcgagcagcttttataatggagcaattatttactgaatatgatttattactaactcctacagttgcgacgacagctccgaaaataaatgacgatttacaaagtcctgagatccgggatgctttggaaacatcagcaaacttaaccgaaaatgagctccatcatttgattaatcaaatgtttgagaaaagccttgagatcacaccttatacccaattggcaaatctaacgggacaacccgcgatcagtcttccgacttatttaactgaaaagaatttgcctttaggaattcaatttatggcagcacgaggccgcgaagacttgctgttacaaatcggaaaattgttcgaaacagaatatggcttctgtttaccagagtattatttagaaaaataaatagaactatttgttcagaccgacaaaattagctatcaattttgtcggttcttttgttacactaatagagtgaaaacgtttcataatcggaggggatactagaatgattttgttaaaggctcagaaagtaattactggtgatggaaagaccattattgaagatggcggtatcgtttatgctgcggacaaaattttagccgtcggaaaagcagaggcgttatcggcggattttccgcaagcagaggttcgtgattatggcagtggtacgattctccctggattgatggatgctcatatccaccttggctattattggacgcaacctgatctgcatcggtacaatgattttatgatcgcttactatgcgcaaaaacaagccgagacttgtctagccaaaggtgtaacgacgatccgtgattgttgtggaccacaatttctgttagaaacattacgactagcagctgaaaaaggatttgtgaaagcaccgcgcatcctacacacagatcgaggaatttgtatcaccggtggacacggacatgaggatggtattgaagaggttgatggtgcagaaaatattcgccacacaattcgtcgtcaaaagaaagatggagcagattggattaagctattgacaacaaatcgcgatgatatttgcgagtttactcaagaagaattgaatgcaggtgtcgaggaaacacatcgacttggaatgaaatgtgtggttcattcagggacacagccagggattcaaatgtgtattgatgctggattcgataccattgagcacggaaactttttaactgttgaacaggctaaacaaatggtgaaaaatcgacaatcctggacacctacaatgtatgcctatcattttttggcagaatataaccaaaaggttcaagaagtcgggatcgatcattcgaatcagtcaactgaaacctattcacatcacttagatttctttgaaagctcggttcaagcgtattcggaaaacttcaaagcaatttatgatgaaggagtaacgattcttgccggaaccgatatggtgatgttagaagcgccaagtgttccaatcgtggaagagttggaattaatggtaagatatggattaacaccaatcgaagcaattcaaacagctacacaaaatcctgcgcgggtatttgatttatccgaagttacaggtgaattgaaaacagggttacaggcagatatacttgttgtagatggagatgcaactacagatattgaggcattacgaaatgttcgacaggtatttttagctggagcagaagtttaagaaaaagtaatcgcctcgtcaaattaaatggaaattttggcgaggcaattctttacatcattttttttgctttttctgtattggcgaagtggagctttgcaaacttgcttaataaatctattccaccctgtcgcaatagtttagcagcaagttcgtcagaaggtttgcctgctccagaaggaacttttgtccctaattctaatgaagctttgtccagttcatcaagaaagcttgcacgactaataatagaagctgctgcaacagaaaggtgatattgttctcctttagtaacaaaatagattttttgctcgatgcgttgagactcctgtttaacgtatttcatgtaattagcttcggaagtgaattgatcaataaggattgcttcaggttttgttggtgcaatctgatctaacaagagacggattgcttgattatgcaatgcgaccttcattcgaacggcattatatttcggttgaatctcattatatttttctggactcacgactaataaacgataaggaatcagttctttgatcgctgttgccatttttcggatttgatcgtcagtaagcatttttgagtcttttactcctaagcgttttaaagcatcaagatgttctttatcagcataggcggcacaaacacacaatggaccgaagtagctgccatttccaacttcatcactgccaagcacagctaatgaggcgaaatttttaggtaggctactgcttgtttttgctgctgaaggatctgagcttccccaacgtgcggcttcttgttcagcattttttccttgaaacaggacttttcccgatgtgtaggcggtaatactggtgccattttttttagcagaaaattcactgtaaggaactttcttatttagaagatagtcagcatagtagtttttcagttttttgatttcagtttttgataatttaagtacagcagaactcatattttttctcttttctttaagttaattggctttcaattgatgaaagttgtacatacgaaagattttagcatataatatattagtgtttttgttatcagaatattttttataaaaattgtttgaggaaggttgatcgatatggcgcaaaatcgctataaggcaatcgttgccggtcagacttatactatcattggacaagaatccaagcaacatatggatatggttaccgcgttggtcaatgaacagttaaatgagatcatgtcgttatcacctgggattacgcaagaaaaagccacgatgttattggcgatcaatgcggtctcagatcaattgaaaaagcaagaagcgttgatgaagttggaaaaacaacaaaatacgcttgaagggcaagcagcccataatctagagttagaaaatcgtatcaagaaaatcgaagcaattgaagccgaagccaaagaaatcatgcggaaaaatgggaaagaaaatgttccaatccgaaatcacgtagaagcgcagcaaatcgttaacgaaaaccgaaaacgtgagattcaaaaaagagcggcaaataaataagtgagggatactatgttaacattggtaattttatttgcattattactatctttttacgtgggttatcgtcgcggtacagcctaccagatagtattttcgattggatatttgatatccttcgtagttgctcggatgttttatcagcaattaggatctcacttggatttatttgtaccttatccatccgttacaaatgaatcaaaaatggtctattactctgtcgaacaagcttttaatttagataaagctttttatgctggagtggcgtttgtcatgattttagtcatcggttggttggtgacgcatctgttcgcaatcttttttaaagatttactattcaaagtgctaattcctcaatatgatggcatcgtagcaggcgtcttacaattaattgtttgctatgttagtatttttctgattttgaagttagcaagtttcgtacccatggccttaattcaaaatcacatcgaaggaagttggtatgctcggtttatgatcgaacattcgctgttcttaagttcttattttaataatttatgggttacaaatattattggataaatgaaaaaccgggacgctgtttgacaggtttcggtttatttatgtacagaaggtgaaaaaatgaatgaacgtattctaaaaacgttagagttcgaacaagtaaaaaaaatgattcaacagtatttaacaactgaacaaggggaagaagaaatccgtcaattaacaccttctaatgatgaggatactatccaggcatggctggatgaaacggaagacggaatgaaggttcaacgcctacgcggaggattaccaattcccaaattaaacaatatcaagccacatatgaagcgaattgaaatcggagctaatctaaatggattagagctggctgaagtctcgcgcgtactttctactacaagtgaattggtgcgttttattgaagatttgaaagatagtgaattagaatttttgcgtttatatttctgggaagaccaattaaccaccttacctgaattgagtggaaaactccgtcgttcggtggaagaagatggacgtgtacgagatgaggcttcacccgaattacgtacaatccgcagtcaaataaggcgtagcgaacaaacaattcgtgaacaattagatggattaattcgtgggaaaaacgcaaagtatttgagcgatagcttgatcacaatgcgaaatgatcgatatgtgattcctgtgaagcaagaataccgtggtgtttttggtggagtagttcacgatcagagcgcttctggtcaaaccttattcatggagccaaaacaagttgttgagttaaacaatcggttacgacagcagcaaattgcagaacggactgagatcgagcgtattttagctgagttatctgcagaattggtggcccctcgtaaagacattttacacaacgcctatgtattaggacgttttgacttgatgaacgctaaagcacgctttgccaaagctctaaaagcagtcgtaccaatgattaatcaagaaaatcatgtgtttttcaaacaagcacgtcatccattattagatcaagaaaaagcggtagctaatgatcttatgattggagaagactttcaggctgtcgttgttacgggtccgaatactggtgggaagaccatttctcttaaaaccttaggccttttgcagctgatgggacaagcgggtctgccgctgcctgttggcgaggaaagcgagatggggatcttcgatgaagtttttgcggatattggtgatgaacaatcaattgaacaaagcttatcgactttctcttctcatatgacgaatattgtttcaattttagataaaattgatgagcatagtttagtgttgtttgacgaactaggtgcaggaacagatccacaagaaggagcggcattagcaatcgcaattttggatgcagttggggcaaagtcttcctatgtaatggcaaccactcactatccagaactaaagatctatggttataatcgatcaaatacgatcaatgcaagtatggagtttgatgttgatacattaagtccaacgtaccgactattgattggtgtacctggacgtagtaatgcttttgaaatttctcgtcgacttggattagatccattagtgatcgaaaatgctaaacaaatcattgatgaagaaagtcaagacctgaacgaaatgatttctgatttggagaatcaacgaaaggcgacggaaacagaatatttggagattcgtcattatgtagatgaatctgagaaattatatagagatttgaaaaatgcctattcctatttcttcgatgaacgagaaaaagaaatggagaaagctcgtaagaaagctaataagattgttagtgaagctgaagaaaatgcagaaaaaatcattaaggatatccgtcagatgcaactggacggccagagaaatgtaaaagaacatcaattgattgacgcaaagacccagttggctgatcttaaacaagatgaaaatcttaagaaaaataaagtattgcaaaaagctaaagcaaagaaacaatttaaacccaacgatgaagtgatcgttgaaacatatggtcaacgtggaacactgattaaaaaagtcagcgataatgaatggcaagtccaactagggattttaaagatgactgtctctgaagatgatatgactttgactaccccgatagaagaaccaaagcagcgtgtaatcactggtattcaacgaggtgctagttccaaagtaaaaccagagctggatttacgtggaaaacgctatgaggaagccttagcagaagtggatcaatacattgatgcagcccttttagcaaactttgctcaagtacgaatcattcatggtaagggaacaggggcactacgtaagggaattactgattatttaaaaaataatcggaatgttcagagctttgagtttgcccctgcaaaccaaggtggaagcggtgcgacggtggtaacctttaaatagtttacaagtgtaagcagaacagtagcgaagaaaatgggaccgtgctatactacttttagtaagaaaaacagatgctaatttttaacgcatctaagttataataggaggaattcaaatgtcacaagtagttactgataaaacttttaacgaagaaacagataacggtcttgttttgatcgacttttgggcaacctggtgtgggccttgtcgtatgcaagcaccgatcttagaacaattatccgaagaatacgatgaagatgagttcagagttgtaaagatggatgtggataaaaatccagaaacaccagcatccttcggcattatgagcatcccaacactggttttgaaaaaggatggacaagttgttgataaagtaatcggtgttcatacgaaagatcaattaaaagagcttatccaagctcacatgtaggaaattgagctgggcattttgtccagcttttttgtcagtttagttttaaactaatgatgtagctcggaagggaagcaacttatgaacgaacgaatcaaaaataaattagcacttttaccagatcaaccgggctgttatctgatgaaagacaaaaacggtacgattatttatgtcggaaaagctaaaatcctaaaaaatagggtacgctcttattttactggcagtcacaataccaagacagagcggttagtcagtgaaatcgtggattttgagtatatcgtaacagaatccaatatcgaggcattactactcgagattaacttaatcaagaaaaatgatcccaaatacaacatcatgctgaaggacgataaaacctatccttttctaaaaatcaccaatgaaaaatatcctcgtttgatgattactcgaaaagtcttgaaggataaggctcattattttggcccatatcccgatgtgaatgcagctaatgaaacaaagaaattattggatcgattgtttccattaaggaagtgcaagccgtcacaaaaaacgccttgtctttattatcatttaggacaatgtttgtgtccttatgcttttcacgttgatcctcaagtttataaggacatggtagaagaaatcaaacgctttttaaatggtggccacacagagattcagaagcaattagaagaaaaaatgaaactggcagctgcagatatggagtttgaaaaggcagcggaataccgtgatcagatcagagcaattgaaacagtcatgacaaaacagaaaatgacgaatactgacttggtggatcgtgacatttttggttatgcgacagacaaaggctggatgtgtgtacaggtattctttgtccgtcaagggaaattaattgagcgagatgtttcgatgtttccattttataatgatgcagaagaggattttttaacctacattggacagttttatcaagaaaatgaacattttattcctaaagaggttttgattcctgataatattgacaagcctagtgttgaagcgatgctggcaacaaaaattttacaaccacaacgtggagaaaagaaaaagctagtaaaattggcagggaaaaatgcccaggtcgctttgaacgaaaaattcgatctaattggtcgaagtgaagcgcgaacgattggtgcggttgaaaaattaggcgatgctatgaatattccagcaccgattcgaattgaagcttttgataactctaatatcatgggaacagatccagtatctgccatggtagtttttattgatgggaaacctgctaagaaagagtatcgcaagtataaaatcaaaacggtcaagggaccagatgactatgcgtccatgcgtgaggtcatttatcgtcgttactctcgggtattaaaagaaggattaccattcccagatttaattgtgattgacggagggaaaggccaagttgatgtcgcgaaagatgtattagctaaccaattagggattgatatcccaatcgcgggtctagcaaaagatgataaacacaagacgagtgagttgctatttggtccagagttgaacgtagtgcctttggaacgcaattcacaagaatttttcctgctgcaacgtattcaagatgaagtccatcgctttgcgattacttttcatcgccagctgcgcagtaaaaatagttttgcctcaaaactggataatattgatggattaggtccaaaacgtaaaaaaatgttgctgaaggaatttaagtcactaaagaatatccaagcagcaaccgtagatgagctacaagaagtaggtttgccaaaacaggtagctgaaaatacatttaatcaattgcaagaaaaataatgtatagcaccctttacacaaaatgtaaagggtgctatacttttgttatgaaatgtaaagggacctatacatttgaggagtggtcgtttgaaaaatcgaatccaagaattacgcaaagaacgcaaaatgactcaaagtgaattggctgatcatttagaagtgacccgccaaacgattatatctttagagaatggacggtacaacgcctcattgatcctagcctataaaatttcgcgattttttgatttaatgatagaagaagttttcatttttgatgaggaggatgaataatgaaggagttatcaaaactagatcgcgagtatcgagagaaattacgcaagaagaatataggatatttggctgcaattatctttatgttaatctgttctgcaatcttatttattggtacaaagtggtatgagttgaaaataaatgatcatgcagtaggatttttgtcaggattctttttttcgctctgttcagtatttgtgatctttctctttaaaaatcgacaaacgatgaagaatcctgaaaagctaagacaggagcgtatcgttaagaccgatgagcgaaatattgagatttctgcgaagtcactacaaataacgacctttgtgatggttattagcttagctattttgagcatagttggcagtttcatttcaagaacattaatgacgacagctagcggattgctaaatttatttctaatcagctatataattagctattttttctacaaaaagaaactataagcattcagtgatatatccattttttaaggaaagtggatttaataataaaaaggagtgagaaaatgttagaggttaagaatttgagtaaaagttttggatcgtataaggccttagacaatatgagctttacgattgaagacgggaagattttggggttgatcggacaaaatggtgcgggaaaaacgacaacatttcgtttgatcttggacttcttaacaaaagattctggcagtgttttatggaatgggcacacattgtcgggaaaagactataatacaattggttatttaccagaggaacgagggttatatcctaaagtaacgattgagaatcaattacttttctttgcttcattgagaggaaagagtaaacaagagattgcaccaaaaattgatgaatggatggagaaatttcaagtcaaaggtaagaagaccgataaagtaaaatcgctttctaagggaaatcagcaaaaagtgcaattgatttcaacgttgattcacgaaccaaagttagtgattttagatgaacccttcagcggattagatccggtcaatgcggaattattgaaaaatggcattattgaattaaaggaaaagggctcgtgtgtcattttctcaagtcataatatggataatgttgaaaaaatctgtgatcacctgatcatgctgcgaaatggtgaaacagtcttaaatgggaaggtacatgagattcgcgaatcatttggacgaagtaaattgtatctagaatctcatttgaccaaagaagaattagaagccttttcgggagttcatacagtgattcagaaagaagacggtagttttgatataacgttggaatatccagcggctggtcaagaaatttttgttaaagcgacaaaggacggctatattcctatgtttaatcaacaaccaccaacactagaagaaattttcaaatggaaagcaggtgctgtaaatgagtaaaatgggtattattatcaaagatgtatataaaaagaacgtaaaatcgacagcctttctcattatgattctagcaccatttttacttatggggattttctatttgtcacaatatttcttcggtgatgcaaatgacatcaataaaatcggaatcataagtgatcaacctgcgatagcagagcagttggctgaaactaaaaatgatgattacaaattcaaagtaattaccagcgacaaaaaagcacaagcacagttagaggataaaaaaatcgatgcctatcttgatttgaaaatgggcagcgatcaagtttctggaaaactttacagcaaaacatctttggggacctcaactgaaatgcagttacaacaaattttaagctcgatgcaggcgaatattcgtgctagtcaattgaatctgactacagcacaggttcaaaaagtgatggagccagcaaaatttgaatcgacaaaagttatttttgagaacggaaaaatgaaaaatgacggtggggactcgggaacacagtttatcttgagcttcttgacgacgatcattatgtttgtgtttattgtcagctattcatccatcatcgctcaagaaattgcctctgaaaagggcacgcgaattatggaagtcttactttctagcatgaaggctaaaacgcattattatgggaaactgttgggtgtattattagtagccttaactcaattattgatctacggtgttgctattgtactaggatatagacagttcaaagatatggacatggtaaaggatctgcttagtaatgtatcaattaaggccttattaggcagcggagcttttgtcattataaccttcatgctggtagggctattcttgtatgcggtattatcagcgctatgtggttcgctggtaagcaaaccggaagatacggcgaaagcaatccagcctgtaacctacttatcgatgattggctatatgttgagcttgattttaggaacctctgatccaactaatgtaataatcaaagttacttcctatattcctttcttatcgtcttacagtatgcctttacgacttgcctctggaactgtagcgctttctagtgcttttgtatccttagcaatcttagttttattcacgattttcttaacacttttctcagctcagttgtacaaatcaaatgtattagtgtacagcgaaggtggaacgtggagtgctttgaaacaatcaatttctatcatgcaaaatgatcggaaaaagaaataatcaattcagttgaccgttgaaacaaaatctccgacaatagagttgtactaaaaacagtaaggctcatattaaagacgaacaaggaggaagtttgatggacaaaacaaaacagttggcaaatgggattgagatgccaagacttggtttaggtgtatggcgcgtggaagacaatgacgcaacgaattctgtaaagtgggcaatcgaaaacggctatcaattgattgatacggcagcggtatataaaaatgagcaaggcgttggtgaaggaattcgacaatcaaacactaaaagagaagatttgtttattaccacaaaactttggaatgctgaccaaggttatgattctgcccatcaggcttttaatgatagtttagaacgtttaggtttagactatgttgatctttatttgattcactggcctgttgaaggcaagtttaatgactcctggaaagcgatggaggaaatttacgaaagtggaagagcaaaagcaattggtgtgtcaaactttcatcagcatcacattgaagaacttatgaaaacagcgaagatcaaacccatggtcgatcaaatcgaactgcatccgactttaacgcaagtggaattacgtgattttttagcgaaggaaggtatcgctgttgaagcatggtcgcctcttggtcaagggaagattttgcaaaatccaacgcttgttgaaattgcggagaagcacgataaatctgctgcccaagtgattattcgctggcatttacaaagtgatagtattgtgattccaaaatctgtccatgaagagcgtattaaagagaacttcgatgtatttaactttgaattaaatgatgatgaaatgaaacggattgatgctctgaatattaatgagcggttgggagcagacccagataattttgatttttaaatttaataacggtatttacctgttatacaaaaaacatgaacagacatctccatgtccgttcatgtttttttaacattaaaggaagtataacattttaagcggtcaaaggattgatacatcaatcttttgaccgcttttcatctggtctttttcctattaaactggagatatgaaacccaatattttacacgccattttctttgatgaatatcaaaactgggagaaattcaatcaaaggtacacaagaaggattcgatccgttgtgaaaagagaagtgaagaagtttcgcgattgtggtgaccttaaaaaaggttatcgtctatttgtctgtgaaggatgccatgatgtaaagaaagtggcttttcgttgtaaagggaaattttgtccaacttgtgcaactggggaaagtcaacggtgggcagaggttgcggcgaatgatctgtttacagtgacgcatcgacacgtcatcttcacgatcgatgaaggtttacgtgagatttttctgaaggagaagtatcgtaaggagcttttaaaaggattaatggatgaagctgcacggatactattagatttttttagaaagcaccatatacaagctggggttgtggcaacactccacaccttcggttctcagctagaatacaatccgcatgttcatttagtcgtcaccatgggtggactgacgaaggatggaaaatggaaggactatgactattttccgttcgcaatgttgaggaaatattggcagaatgcggtcctaaagctcattcgaagaaccttatcccaatgggataaggcacgagtccagccgcttttacaagcggcgtacacgaaaaatgcagagggtttttacgtgcatgcacccaaaaggagccgaacttctctcaaaaagatattagaatatatcagtcgttatatgaaacgtggtcccattgctttaaatcgtatccttttgtacgatgggaaaatagtgatgtttcagtatcatgataaacgaactaacacggataagataaagacgatgtcggcagaggaatttattggtgcactgattcgtcatattccagagaaccagttcaaaacaattcgtagatacggcatttatagtcggcggatcaagacaatcatgaaaaaagtattaagtaattaccagaaagagattcaacgaatgcttgtgaatgtgaagaaagcacttaaaccaaaatcatggtgtgaacgaatagccgaagaattcggagtaaatccattggaatgtactagatgtggcgaatattatgaatttagtggagttagtgtgtctaaaaatggacgacttgtagtgaaatatgcgaagaataaagaatcggaacgattcatgcgagaggagaataaaaaaattggggaagaagcatcgaaacgtaagtatgaaaaagaaaaagaagcagcttttaaaaaacttcgattccaatggagtggttcattacatttgtcttgaatgtgggataaaggaaaaaattccaaaggaagtagttcaatttttggatgcaggagatgttgcatttgatcctgagaacgctccgcaatttgattgcgaaaaatgtggtggagagatgtatccagaatactataagaacgtacttggatacgaatttagaatcagtgatcgacaataaaatgatttatctaaacaaaaagtcctcaggagcggttttctcctgaggttttcttagttagaattttaaaatgtgaagcacttcgttgttttgtttttttaacaaaaaaatagaattatttttgtcagaatagtatttcgtgaaaatatttatgataaaatagcaagaaaaaggagggttttgatggaagaatttttagtaaaaattaattctttgatttggggagctccgatgatcattctcattttaggaatcggcattattttaaccattggttgccggatgatccaaatccgtcgtttacctttggcgctgaagtatatggtgaaaaatgaagagggcggtcaaggggatgttactagttttcaggcattatgtacggcactatcagcaacgatcggtacaggaaatattgtcggcgtcgctactgcaattgtcgctggaggtccaggagccttattttggttagaactcgcaggattgttaggaatggccacgaaatacgcagaaggtttattagcggtaaagtatcgcacgtttgatgatcatggaaaagcattaggcggaccgttttattatattgaaaatggattaggacctaagtggaaatggctagctaagatgttcgccttttttggagcaattgctggtgtgatcggaattggtacgattgctcagattaacggtattacttctgctgcggaaaccttctttgatccggaaaaattaaatacgcttacactttttggcaatgaatactcttgggcggtcattattacgggtatcgtggtaacagttttagtcgccattgttttagtcggaggcgttcaaagaattgcccgtgtatctgaaattatcgttccattgatgatcgtaatctatgttggactttgtctttttatggttattttaaacattacaaaattacctggtgtcattgtcgaaattttccaaagtgcctttggcttacgcgctgtatcaggcggagctttaggagcgatgatgattgcaatgcaaaaaggaattgctcgaggaatcttttcaaatgagtcaggtctaggaagtgcccccattgcggcagcagctgcacagtcgaaagagccggtgcgtcaaggattggtttcaatgaccgggacctttattgatacgattgttgtctgtaatatgactgggatggcgattattctaactggagcatggaaaacaggattagatggttctgctgtaacgatttatgcgtttgcggaggcattgccacttacccaaacggtggcatcgcttttattgatgatctgtttagcattctttgctttcacaactattttaggatggaattactattcagagcgttgtctaagttacttaacgggtggaaataccaagttttcagcgatattccgttgggtttatatctttgctgttttcatcggaccgtatttaactgtttcggcagtgtggacgatcgctgatatttttaatggattaatggcctttccaaacattgtcgctttgattctgctgagtccagttgtattcaaagaaaccaaatcttattttagtcgattatctgcaggtgaagtaaaggaattttcatctgtgtcgttaacggatgcttcacttgatgatgactaaattcaaaaaaatacaaaaaaaggctcttcgtcaaatcgtgttggtgaagacaaatttgaataaaacttagtccgatatgcggcgcgttctgtgcgccgcatatttttttagttttcaaagatcagaccttgttgtaaatagatccgtgcccgaaagttataaaagttgcgataaccaaacgcaattcgtttaatcagcttgatcttgttattcagcccctccgtgacaccgtttgagtgggacactttaaaggcatttgaaatgcccgattggtagcgatggaagatcgtgaatttctttttaaacgactgaggtaacgtagatgaaattgttttaagggtttcttgaaagccttccgtatctcgtttaacgaaataatagcgtaataattgacaaaaatgatacgctgttcgcaattcttcgttgtagcttaacagttcatcgacgatttctgtttgactaattggtcgtttaaacagtcgatgataatgccgtttgagtggctccaatgtcgtggaatctttgagtaagagtttccaatatcgcttgagccgacggtacttcttctgattttcagagtgtgaggttcgaaaacgattcatgatctggacacgtaattgattgaaactgcgattgatgtgttggacaatatgaaagcggtcagttacgatctccgcatttggaaagaccgttttaagcaactgacaatagctggcattcatgtccatcactaggtacttgacctttaaacgggcctttctaggaaagcgcaggaagtattgagttagtttgtaaagtctgcgatcttcaaggatcgtaaatagctgattggttgtcccatcaacacaaataaaactcatggaaccagaaacagacttcattgatttgaactcatccatacacaacaccgtcggaaggaagttcatacgtggctggtaatgcttcgttgcttcacgcaagatccgtgtcaccgtcccatccgagacgaagtacttcttagcgattagtttacgtgattgattttcgtacagttccatgagaatcgcctgcttcagttcctttgttagttgatgatgttcatcaactaagtccgttttcgcagaaaaggtccgtccacaatcatggcagagaaaacgggtacgttttaattctaaaatagttaacttttctttgactttcaacatctgagtgcgtgtcgtataggaaccgttgcggataatacgaaccgatcgacagtgttcacaacaggaaggagagtcatccaattttcctttaataaactgcgcttgaacgcctttatattctttttcaatcagccattcttcatcaaaaaataaatgtttatctgttaatccgagtaattttctagtatgattatccattgagagactcctttggtagggtgacgttttggtcgactaaattttaccaaaagtgagtctctttttgagttgaaacgaagaaaaaagtgttagtagaaaatcgccttcgattttccaccaacacaaaatattatagaacccaaaaaaactgtggcaaaacaatgattttgccacagcttttttgttattcgtaacgtaaggcattgattggatctaaccgagccgctcgattggcagggaaagttccagctaaaaatgcaatcagcataattattaacaggatgatcaacatggacggccaagaaaactgtaacaaggttaaacctgtgagtccgtctaaaaacatactaagattagagggacgaatcagtgacggctgattcgtccctctatcttttctttttggattatagtgagaagtgagagaaagctcggacataacctcatgggcggcgtataagcccgcatttaaaaacgagcttcttcacttacattcttgaatcaggtttaagtatgttggggcttcgagcccgtgtataggaaattggaatcggaatgagtagtgaagaactttctaaaacagaaagaaggatttgtatggcaacgattgtcgcactagatgtttcaaaaggaaaaagtttttatgtgatgtatcaagaaatgacgtgtctttatgaaggtgaaatcacgcataccaaaagcggttttcaagaattacatgctcttattaagaatttacctgaagtgccggaaattgtctttgaatcgacaggtatttactctcgaccagtagaaactttttgtcaaaagaatcagttgattcattatgttttaaatccacttcaagccaaacaacagatggaaaaggaatctttgagaaaatggaagaccgataaacgggatgcgcatcgattagcacaaactcattggaataattcaaggacgaagtctgtttcagctgaacctctctataaagaacttagagacctttcaagattctatcaagaaatcatggatgaaatcggacgtatgcgcatgcatttgcacaacgccatccaactaacctttcctgaactggaacaagtcttgtctaacaggcttacgccatatgggttgacgatgatcgctcaataccctcatccatcattcgtactgaaacaatctaggacaatcattaaaaatcgtctaatggcctctaccgcaaagaaaatctcagagaatcgtgcaagaaacaaagcagatgaactgattgcttatgccaaagattcctatccagctgtttctgaaacggcgatacccgtcgcaaaaacacgctattatgcggagcagctccaagctcttttaaatcagaaagaacgcttagcgaaccaaatgattgaaacagccaaacagttggaagaattttcagtgatcgctagttttcctggcattggtgaactcagtgctgcccagttcattggtgagctaggagaccttcgacggttttctgatcccagaaaggccaacgcttatattggtattgacataaggcgctatcaatctggaaactatttagcacaagaccacatcaataaacgtggaaatccaaagggtcgaaaaattctcttttttattgtcaagaatatgataaaagcacaacacgctgctccaaatcacattgtcgattactattacaaattaaaaaagcaacccctcccgaaaaaagaaaaggttgccatcgtagcttgtatgaacaagctgctaaagtgtctccatgccatgattaggaatgggacaaagtacgattactcgtacacggtctcaacggaccattaatatagggtaattataccacgattttccctcctttaaaaaaaaaagcaaagtgagggctatttgatgtgggtaaaaataaatagaggctcttcttcgtttctcttgactaatcgtaggaaatgaggttgtagcaaaatcatttaaaaaatgccctgctacaacagcaccagcgattcctgtaacgcctccccagaagccaatcaataaagcttctatactgaaggttaaaaagactttgaagcgccccattcccatagccttcatcaaaccaatttctcgtgtacgatcttgaacagacatgtacagtgtattgataattccaaaacttgcagctaataaggcaattgcaccaaatagagtgagtacacccgtgattgcgttgataacttgacgaatcatcccaatttcatcttcaacggtcatagcagcaaagccttttttgttcaaacgtttcttcagctgttcgatttgtttcttcgataagtttttatccatagtagcaaaaagggtcccatacttatttttcatattttctggcagtcctttttcgttcacactaacaattttgtctgataaggctttactcataatcgattggccttgttgaatcaaactaacatttcgaacgcctacaatagttgcattaagaacttcttgttcgcctgttgcttgactgctgaccgcaatttttagattctgattgagtgcgtctttggctgttttgaagcctaaagatttcatatattctggagctatattaatttcatacttatcaccagtactgtttacttcacgtccggcttctaaatcaattgaaatatcactgacacttacagcagataaaagatatttttctccatcatttcgttgaatgtagtcggttgacagaaaatgaaaaggttcgacttttttaattccttttgttgccttgattttatctaaatcctttgtcgtcaaataatcggcatctgctccagaagccttatcaggatcgtacttttgcggttcattgtcagtagaccccatttgagattctggaaagaccatcagctgatcttcgccgcctacgccactgatttgtcgatcaatataatcattgacaccattattgacaccagttgttaaagaaattgtaaaggcaccgatgaaaatagcgatcaccgttaaaaccgttcgccccttgttgcgccataggtttgagcttgcagatttgataatgtcaaatagtttcatgttaggcaccctccaataattgaccgtctttaatgtgaatttggcgatcgcatcgttctgctaattctgggtcatgggttacgataattaaggtgatgcctttttgttgatttaaatcaaaaagtaatttctcgattttttcaccagtggctgtatccagatttccagttggttcgtcggcaaaaatgatttctggttgattaacgatcgcacgagcaatacatacacgctgtttttgaccacctgacaaatcattcgctttattgttcgctttatcactcaattcgacagcttctaaagcgtctattgccatctgttttctttttcgactcgggattccggcaatttttaatggtaataaaacattcgataaaaccgtgtccttaggatttataaaaaattgttggaagacaaaaccaaatgtttcatttcgcattttatttagcgaactattttttatttggcgtgtatcttgattcagtaaagagatcttacctgaacttggtcgatctagtaacgctaatatgtgcattaaagttgattttcctgatccacttttaccaataattgcgacagattctcctttttttattgcgaaattaaccccttttaatgcttcaaaagccgcttggccagaaccataaacttttttcacatcatttacttcaattgcattcattattttcctccttttagctaaaagctatggattgattctcccataagtcgaaaataataaaatggtactaaagtagtattttaacgattatcactaaagaaaataattaaaatgagcaattttgtcagtttgaatactgatagaagtatttctagatatgtttttgaactgtttctagttaagaacgtaaaaaaagagtaaatcagtgatttactcaaagtcttgaacaaagaaatcaaataacgcttgctcttgagggttattttgacgagttagttctggatgccattgaacaccaattatttttgtgtttcgttcacgactttcgacagcttcgatgataccgtcggttgaccaagcaattggaacaagactttcagctaggtctttaatagcttgatgatggtatgaattgacctgtgcacgttcaccaaataagggagccaatgcagaatctcctttgacggtaatagaatgtaggccgaaatcgggaacagtgggaaacatatcgtgttttactttccaatcagcatattgtgacaagtcctgatacaatgtcccgcctaacgtgacatttaaaagttgtgttccgcgacaaacagtaaaaattggtttattctgtttgattgcctctttgattaaagccatctcgaatgagtcgcgatcaatgcttgtagggcctagctttggatgtggttcttccccatataaaaaaggagtgacatcctgtccgccagccaataatagcttatcaattgttgcaatataatcactagcaagctcaggatcactgataggtagtaagatgggaacaccacctgcttgatgtacaccgttaataaagccttggggactataagtaaattgttgatcaaaaaaatcttgattattttgataatgctgattcgctgcgacgcctataattttcttcttcataattataaatccgccttcctacgaaaggcaccaatgaggtgatgaaaaccttagagcgccttctttctttttttattccgtgttaccctttccttgcaggtccctggtacactacagaacccgaggaggtgagtggcggggctgtatagcggcaaccccgcataattatatggtgtcggtcatccgttaaggcatcaatgaatggcgcaaacccgtagcccgtaaacttatctcttccgaagttgactcgatttcgccggatgaccagtccctaccaaacctgtactatttttttacaggaggttgctatgttcaaaatctttcgtaaaaattgttgtggcttggatgtccacaaaacgtggatctatgcgtgtatcggaatcacagatgcgaatggtcgtacagtgtataagcaagctcgcttctcttcctttacaaaaggtctcaatgaattagctgaatggcttgctaaatacaactgtaaggatgtgtgtttggaatcttccggtaaattttggatccctgtttttaatattcttgaaaaaacttgttttgtcacactggctcatccgaagtacaccaaaccccagaaaggaaataaaacagatcgcaaagatgcaaaatggatttgtgatctctttatgtgcgacatgatcaaacccagttttattcctggtcttgaaatccgccagcttcgtgatctaatgcgttatcggacgaaactgaccaacatgaaaacaagtgaaaagaatcgtgctttaaactgcttaaccgtttctaatctgaaactagatgatgtttttagtgatgtgttcggaaaatcatccacttctatcatccaatacttgttagaacatcccggtgaatcatttgatgttcgaccatttatccatgcccattgtaaaactcccgttgaagaaatccaagcggcagttgagggggcgatttctgtacctcaagcgattaagcttcgccaatgcctcaaccatattaacgagattgagaagcatcgagaagagatcaatctagagattcaagctcttgcagaacccttctcccctgttttggaactacttcgtaccataccgggcttagacactcagccaataacagcgattgcgattctttcagaaataggaccggatatgtccgtgtttccaacttcgaaacactttatttcttgggctggatgctgtccaagaaacgatcgcagtgcccgacgaacaaaatcaacacgtatctctcgtgcagggcagtcgttgaaaccgctacttgtacagattgccaatgctcttctcagatccaaagaacatccagaatttaaaaatcgctatcgtagaatcaaagcgaatcgtggacacaagaaagctatcattgctatttgtaagatgctcctgaccgctatctggaatgtcttatcaaaggtggaaccctattctgctaaaggatatctggagccaaaacctgcgaaagaagagaaagttctgacgcaatcccaagctctggaccttttaagaaaacgcggatataccattatagatagtgcttaaaccaaagttacgttgattcttcctaaatagactcgttgtcttccatttcaaaaattttgaaaacggtaggcttatttagtgtaccgttcttcaggtatcttcaaatagatttattttcaaactttatcactccttttatcttttgataccatagccaaaacttaaaaagcaagtaattcgatcttaattttttcttcaattttgaaataataaaaaaactgctacaaatatgaaaataatgctatatgttgctcaaaggctttagaaaaattttgtcttttttttttgaaaaatagttacgggaacacctttttttgatatactgtagtcattgaataaatacaaaaaggttgggcgtaagcttcaaggatcgtgttcttcaaggggtgagaagaacaaccttgagagttttgcgttctttttttgtatgtaaaggagggtttgtgtgttagaagctttagaaaaaataaaatctgctgaagaactaaatgaaagaaaaaaagaacaattactggctgaattgacagcttatgaggcgagtaaaaaacaactgctacaagaaaagcgggaagagctgagagcagatttttcaaatgctttgtcggaaagagagcaagcgttagctcaagacttagcggctgaagaacaagaattgtccagaagtgctgaagacgctattaagcagatggaagaaaactacagttcaaagaaagaacagacgattcaaaaaataattgaaagggtgatctcggaatatggcagtcagtaaaatgagtaagctgacattgattgctcaacaagaatatagtgagcgaattttatctgcgattcagggtttccaaggagtggaaattcgagacctctttcagcaaacagtcagtaatgaatgggtcgaggaatattttaatgaaatagatcctttgcctagtcaggatactcttgcaaaaattgattaccagttagaacaaatcacacatgctattagatttgtcgagcataacggaagtagtcgggaaaaaggccttcatcttaaacgtcaggttgccactttaaagactttagaagagaatttcgatgaagctgctttactttcggaattggaaagtattcaagaattagaacggcattttttggatgctagttctagacaacgtgatttgagcgaacaagaaagtcttttacaaaaatggcaagccttagattttttgccaaaagaatatgcactacgttcatcaaagtgttttctaggaactgctgatgcaagtatttgggaatcctttaagcaagagttgaaggacaaacaaattcattatgaaatcatttatagtgacgatcatattgtcaacttcgttctattatttttacgtgcagaacaagaggaggtacaagaacttgttcgtcaattcagcatagttgcctttacgtacaatcgaacacagcttcctaaaacagaattggccagcattcagcgggaaatgatgaaattagtagaagaacagaaaaagctggctcgactgattgggcagaagaaaatcgttattgaaaatctggaaacttcagaagaagtactgttggcacgaaaaaaccgctggttaattcatgatcgatttatcaaggatgataaagtatttttactccaaggatggattgaaacagacagtttcaaaagctttgaaacttttgtagaggatctaatcggagctggaaatctgtatatcgaaattgaagaaccgacggatacagagatcaatgaagaaattccaactaaattaaagaatcataagttaattaagccttttgagatgttaactgaaatgtacagtttgccaaaatatcatgaagttgacccgacaccgtggtttatgccgttttattttgtcttctttggcatgatggtagccgatgcaggatatggtggtctgatgttagtggcaacaactgttgctttgcgaacaattttaccgcgcggaatggagcgttttatgcgctttttccaaattttggctgttcctactattttatggggcttgatttataactcgttctttggcttttcgttagactatacgccaatactttctactagtgatgatgttattagtattctgattctatccattgtttttggtgtgatacagatttttattgggttagggttagctgccaaagagaatatcaaagccaaaaattatctaggtgcagtttcagatggttttgcctggcaggggattatggtcggagcaatcgttggtggtttaggaaaaatgctgatggatagtcaagggctcttctttatcggcgttgggcttgcagttttaagtgctctgctgataattgttactccgatgctacaatcaaagtctaaattgaaaggattagccaaaggagcatataacttatatggaattacaagttatattggtgatttggttagttatacacgattgatggctttgggtatctctggcggaagtattgctgcagcatttaacatgttggtgggctatatgcctccaatagcgcgctttagcgtgggtatcttattgatgttggctttacatggattaaatatctttttatctttattgtcagcatatgttcatggtgctcgattacaatatgtagaattttttgggaaattttacgaaggtggcggacgtgcgtttagtccactaaaaacagaagaaaaatatgtaaatattgaacaagaaaaataattggaggaattttaaacaatgatggagtatttgattaataacagtggtggtattatttttgcgattttaggaatggctacagcaacaattttctcaggtatcgggtcatccaaaggggtgggtatgactggtgaagcggctgcagcgttgacgactagtcagccagagaagtttggacaggcgttaatcttacagttgctacctggtacacaaggtttatatggcttcgttatcgcgttcttgattttcactaatttgtctggtgatttatctgttgttcaagggttaggttacttaggtgcgtcattaccaatagcatttactggactattttcagggattgctcaagggaaggttgctgccgcaggtattcaaatcttagcgaaaaaaccagaacactcaacaaaagggatcatttatgctgccatggttgaaacgtatgcaatcttaggattcgttatctcattcttgttagttggacaagtgtaaggagttttttgatggaagcaatcgaaaagatagtcgagcagctgaaccagcaagctgacttggagcagcgtcagctgaaagaaaaagagaccgcgcggattgatcaggactttcaagcagaattaacagaaatgaaagcagatcatcttaaacgtctagagaaaaatttacaaaatctcgaaaataattataagcaggctaaaaataggcgtcaggttgcacaaaaacaaatgattttaaatcaaaaacaagcaattttagagcgagtgtttgctgaggcagtgggacaaatggaaaattggtcaacgaaggaacagcaggagtttgctcacaatgcattaaagaaaatgcaattacaggggaatttggtttttgttccgggagaaaaatctcagactgtttttacaaatgaatggcttgccgaacaaaataatatgctggcttatcaattattcatgggcgagaatcctgttgcagctgaggccggttttattttagacaaagacggcgtgcaatataactttctttatcagagtttagtaagagaaatacagcaacgggagagttttcaatttgctcaaacactgtttgaagaaaaggacgtaaacttagattttcataattagagactacgaattaggaggcactgaatgaaacaatctacgtatcatgaattgaatccgctggttcgtttgaaggaattggaactgttaacgcctgaatttatggggcgaatgttaaaagcagaaaatatggaagaagttgagactctttttagaggaacgatttatggcgaatatttaactgataatttctctgaaagttttgaagaagccctagggaaagctcaggaggaattattatcggagttaataaaaatcgtccctgacacaaaagtagtatggatttatacgatgcgctttaccttccataatctaaaggcattaatcaagggcgagttattaaatcaaaattttgatgatctttatatttatgatggtttttattctttagaccaaatcaagacagcaattcgaactggacaagctagcggtctaccagattttttacttgaaagcttacaggaagtccgagagcattttgaagaatcgaatagtttacaaggaattgacattattcttgatcgcaaatatttgtattgccaaagaaaaatagcagatatgattgatgagccagaactaacaaaagaggttattagtttcattgattttactaatatacttatggtagcacgaggaattaaacaaaaaagaagtcgcaatttcatgtcgacagtattatcgagccatggaagtattccaaaagacgaattgcttgattgtgttgagggtgatttagagcgattaacactttttttacgagcaacatcttatggcgaaataatcgaaccaatcattcaagaaaatacgattaatctaactcagttagagcggctttgtgatgactatttaactggcttttacgaaacggcacaaactcaagcctttggacctttgccggtactagcactgctaaacgcaaaagccatcgaggctaaaaatcttcgcttgattattactggcaaagaggtcggattaacagatgaacaaataagagagaggatgcgtgagacatatggcacataaaatcggtgcaatcggtgacaaagactctgtcttaccattcaaactttttgatttcgatactcgaacaacgaaagataaacaactcattcgacagcaaattgatgaaatggctaaaaatgactatggcattatttacatcactgaggaatttgctcagcttgttcctgataccattaaacgttatgaagaaaaaatgattccagcaatcgttttgattcctaatcatgaagggacattaggcatcggcaaatccatgatccaaggacaagttgaacgagcagtcggacagaatattttataaaggagctaatgacttgcaagaaggtagaataattaaagtttctggtccactagtgttggcagaaaatatggagcaagcggctattcaagatatttgttacgtaggtgaccttggggttatcggcgaaatcattgagatgcgcggcgatgtggcatccattcaagtatatgaagaaactgcaggcattggaccaggagaaccagttaagacaacaggagaagcactctcggtagaattgggtccgggaattgtttctcaaatgtttgatggtattcaacgcccattagatacattcaaggaacagactgacagtaattttcttagtcgcggtgttcaaattccagcattagatcatacgaagaaatggtggtttgacgcaacagttgaagagggaatcactgtgtcagccggggatatcgtcgggacagtaaacgaaacgaaaatcatcacgcataaaattatggtaccaaatggtgttaaagggaccttgaagaaaattacatctggagagttcacgatcgatgagaccgtttatgtgattgaaacacaaaacggcttagaagaattttcgatgttgcaaaaatggccagtacgtcgtggacgtcctgtatctgaaaagcttaatccggaagctccaatgattacaggccagcgagtaatcgacacgtttttcccagttgtaaaaggcggtgctgccgcagtaccaggaccatttggggctggtaaaacagtcgttcagcatcagatcgctaaatgggcagatgtggatattgtggtttatgttggttgcggtgagcgtggaaatgaaatgaccgatgtattgaatgaatttcctgaattgatcgatccgacaacaggggaatccttgatggaacgaacgattctaatcgcaaatacctctaacatgccggtagctgcacgtgaagcttccatctatacgggaattactattgcagaatatttccgtgatatgggatacaatatcgctatcatggcagattctacttcacgttgggcggaatctttgcgggaaatgagtggacgtttggaagaaatgcctggggatgaaggttatcccgcttatttaggtagccgtttggcagaatactatgagcgtgccgggcgtgtcatcgctttaggaaatgacggacgagaaggctcaattactgctattagtgcggtatccccttcaggtggagatacttcggaaccagtaactcaaaatacactccgtgtagtaaaagtattttggggattaagtgcaacattggcacagcaacgccatttcccatcaattgattggatggaaagctattccctatactcttctgaagttggaaagtatttagataatgatttacaagcaaattggtctgagatggtagctgaaggaatgcggatgctacaaaaggaatctgaactaaatgaaatcgtacgtttagtcggaattgattcattgtcggaaaaagaccgtctgacactagaagttgcgaaatctttaagagaagattatctgcaacaaaatgcctttgacgatgtggatacttttacatccagagaaaaacaattcaaaatgattcgaaacattctgacactcaataaagaagggcaacgtgcattagaattaggaacctatttgaaagaaattatggatggcacggtcactttacgtgatagaattgcacgaagcaaatatatctcagagtcagagttagaaaaattagatcaaatcaactcggatattgtatcggaaattcaagcgatcgttgctgaaggaggaatgaccaatgattaaagagtataaaaccatcaatgaagtggtcggacctttgatggcaattgacaaagttgaagggataaagtatgaagagctactggaaattcgtttaaaaaatggcgagttgcgtcgtggacaagttttagaaatccatgaagacaaagccctagttcagattttcgaaggaacgagcggtatcaatttaaaagaatctacggctcgttttttaggacatccgttggagttaggcgtatctgaggatatggttggtcgtgtctttgatggcttgggtcgcccaaaagatggcggaccagaaatactagcggaaaagaatgttgatatcaacggggaagtaattaatcctgtttcgcgagattatcctgatgagtttattcaaactgggatttcagcgattgatcacttgaatacgttagttcgtggacaaaaattacccgtgttctctggttttggtttgccgcataaagagctggcggcacaaattgcccgtcaagcgactgtattaaacaatgaagatgacttcgctgtagtgtttgccgggattggtatcacttttgaagaagctgaattctttatggaggatttccgtcagacaggtgcgatcgatcgttcagtcgtgtttatgaatttggctaacgatccagcgattgagcggattgcaactccccgcatggctttgacagcggctgaatatttggcctatgaaaaaggaatgcacgtgttggtcatcatgacagatatgaccaattactgtgaggcgcttcgagaaatttcagcggctcgtcgtgaggttcctggacgtcgtggctatcctgggtatctttatacgaacttggcgacattatatgaacgcgcaggtcgaattcgcggcttgaaaggttcggtcactcaaattccgattttaacaatgcctgaagatgataaaacacatccaattcccgatttaacgggatatattacggaaggacaaattattttgtctcgagaattggataaaaatggtatccagccgccgattgatgtattaccgtccttgtcacgtttgaaagataagggaactggtgaaggaaagacgcggaaagatcatgcgccaaccatgaaccaattgtttgcagcttatgcccaagggaaacaagcgaaggaactagctgtcgtattgggagattctgctttgtcagatgttgataaaatctatgcaaaattcgctgagcgtttcgaagaagaatatgtgaatcaaggcttttacgagaatcgttcgattgatgaaacattggatcttggctgggaactattggcaatgctgccaagaacagagctgaaacgaatcaaggacgatatgttggacgaatatttaacaaaaggagaatgatcctatggtgaaattaaatgttaatccaacacggatggagcttacacgattaaaaaagcaactgacgactgcaagtcgcggacataaacttttgaaggataagcaagatgagctgatgcgacgtttcattttattggtcaaaaagaataatgtcatgcgcgctgaggtcgaagaggaattgcaacaagcaatgaaaaatttctcagtagctgatgcgttattgaatgacaagtacattgaagaattattggcagttcctaaagagcgtgtgacgcttgatgtgattgagaaagatgtgatgagtgtaaaagttccaattatgaacttccagcacgaaaaagaccttgctgatggaccgctggaatatggctttttgaattctaacgatgagctggatcaaagtattaaaaaattcacgaaagttctgcctaagttattagaactgactgaaatcgaaaaaacttgtcaacttatggcaaaggagatcgagaaaacacgtcgtcgtgtcaatgctttagaatatatgacgattcctcagttagaagaaacaatttattttatcaaaatgaaattggaagaaaatgaacgtgcagaagtgactcgcatgatcaaagttaaaaatatgggtgctacttgagaaagtagctcctttttttgaaggtaggaagttatggttaaagaaaaacattggccttttaaaatctatcctattcaatttattgctttaggctttgccgtgatcattttgtttggaagtgtattattgaccttgccgatagttacgaaatcaggacaggggacaccgtttattgatgcgctatttacagccacatctgcgacatgtgtaacaggtttaacaacactgacaacaagcgaacattggaatatgggcggacagttgatcattttaagcatgattgaaatcggtggattaggcttcatgatgatgccctttatttttatggccatcatgaaaagaaaagtcggtttaatgacgcggattattttgcaggaatccttaaatttagatagcttatctggtgtaatgagattgatgctgtatatttttcgctttgcgatgggatttcagttattaggtgcacttttattagctattgactttatcccggcttatggtcttggaagaggtctttggtattcgttctttcactccatttcagctttttgtaacgctggatttgatttatttggcgatagtttggtaggatttcaagataacgcgtatgtgttgtttgtaatttctggattgatcgtcggaggcggcttagggtttatcgtttggcaggatttgatgaattttcgcaagactcgaaagcttagcctacatagtaaacttgcgttaactgtttcgctaagtttactgattattgggacgcttgtgttttgtatttcggaatctggtggacgttatttagtaggaaattcgtcaccgataaatcgttttgcgaatatgcttttcatgtcggtaactgctcgaacagcggggtacttttcagttgattacggcagcgtcagtcaagcgggaatcctttttacgatagttttgatgtttattggcgggacacctggttcaacggctggtgggttgaaaacaacgacatttggtgttttattggttcaaacaatttccatgctgaagggaaggatgcacgcagaggcttttagacgaacgattcgtccgtcggtcgtgtctcgtgcgctgacgttgttctttattacgttgaccttgtgtatcgcagtaacgatgctgatgtcagtaacggaggttttaccacgttttcgtggaatcgagtatcttttgtttgaaaccttctctgcttttgggacagttggattaacgatgggactgacacctagtttgagtcttatgggaaaaatcttgattattggtttgatgtacatcggcagagtggggattctgacagttggcttctcactaaccatacgcttaacaaagaaagaacaaggaaattacaaactgccagaagaaagtgtcatgattggataaaacgagctagattcattcaattgaatctagctcgtttgtttttaacgaataacttcaattttatagccatctggatcggtaatgaaataatacgaaggatccgttcctggaagacctttcaaatccgtcacgttgaaacctttatttttatgctcttcatgaagcttttctaaatcatcggaactaatggcaatatgcccataaccatcacctaagtcatatgctgcatggtcatagttataggttaattccaattcatactcgtccccaggtaaagttaagtaaacaagcgtaaattttgaatctggaaaatcacgacgacgagattcttcaaatccgaatgcttcttgataaaatttgacagatgcctctaagtcttttactcgaacacaagtgtgtgccattttcataagtaagtaacctcctaattattattaagttcatgataacataaaacatccatttctcagcatttatgctcagtggttgtttatgagttttttttaatgtaaactagctagtaaatacattacttaggaggacaccaatgatcccagtgtttggcgaaaaggaagccgaaaaaaaatatcaagcccgttatgcagcttatgcaattttaatgaatgaggaaaaagaaattgcgcttgttcaagctcctaatggtgcttactttttacctggtggggaaatcgaaggtcatgaaacgaaggaagagacgattgagcgcgagatgctcgaagaattaggctttgaggtcgttttatcggaatatttaggacaagcggatgaatatttttactcgcgacatcgcgaaaccttcttttataatccaggctatttttattctactaaaagctgggaaaaagtttccgaaccgttagaagagggaaacaatagcagctgggagcagccagcaaaggcaatcgcattattgaaacgcggcagtcacaaatgggctgttgaagagtggctaaagaaaaaactttctgatcttgattgatcagaaagtttttttttagttaactaacgctccattatgaatatgttttgtgaacgctcggtaatagtcatcaaaaagatccgagtttttactatctagttgggtcatttcttttggataatagaaacgaacatcaccctggccttgtccagttaatgcagagactaattgacttgcctttgacaactcgatcaacgagccgtctttctgcattagttcgatttgtgtgcggtgactgcccttttctggatgatacaaatcataaggcagatcatagctggaattgatcgctgtataatagcggggattaaacccagctttttcaaccaaatctttcatttcgactagtaaggggttctcactggaatccactgtgattgattttaatggcttgcgatttaaaaagcgataggctaggtcacttagaattaaatcctgctcgtccatccattgagcaaaataagtattcagaacgccatcatctaattttaaataatcctccaacgaaaaatcctctttcaaaaatggaatcaagaattgcgaatggagtgaaaaaatttctgcatcttcttgatacaattcatgtgcgcgatccaataaatgttccagtaagacctccatcccacgagacacagaatgaaaatacacttgaacgtacatttgatagcggctgacgatataatcttccacggcatgcatgccattcatagaaaacgcaatcccgccttcgtaaggacgaatgacacgcaagattctggttaaatcaaacgttccatattctgtcccagtataataggcgtctcgcaataaataatccattcgatcggcatcaatctgactagagatcatttgtacaacttgcggattgtcataagttttggtgattacactggcaactttttctggaaaaccttcttcgacattatttaaaatctgaaagacttccgtttctggcgatgtaatgatcgctacagtcaatgcttcatgatcggtgtggaaaatatgttcaaacgtgtgggaataaggaccgtgtccaacatcgtgcagtagcgctgcgcacaaggcaactaagcgatgtgaatcatcccatccgtctttaccgtatttttcttgagaatagtttcgctgaaaaatatcacagattcggcgagtgatatcgtaaacacccagcgaatgtgaaaaacggctatgctccgcaccatgaaaagtgtacgaggtagttccaagctgtttgatccggcgcaaacgttgaacttcctttgaattgatcaaatctaaaattacttgatgctgaacatgaatatagttatggactggatcgcgaaaaactttttccagcggcagcatttgatatttataagtcattaagtacctcctgaatgagtgtgttccgttgctgcatattttgaacgcggcgttgatattcttccaattggtaaaaatttggcagagagtctgtttgatcatgatgaggcatcacttgcagcaactccttttttacagaatttacggatacttcatagaatgcagtatcgtctagcgttgtcatactatcaggattaacaggtggataatccacaccaaattgatctctcaatccgctttgataataagagcgaacgatttttccccgaagattttgatcgccatttacgctaagatacatcatgattgcaacgccttctttaactcgtctctgggcgatccccgcaattttttttcctttaatggaaagatcgtatttacctggacaataagaatcagcgacttcgccaatttctattcctaatttgccaaagcgagtttgctctaaccagtctaccattgcctggtaaccgtcatcaattgataaggcagagattgaatttttaggaagaattaaagagacattcaaaatacctgtgtcgctaataacacccaaaccgccggcattacgtaaaagcaaatgatagccttctttttgaactactttaagtgcttcattaaaataagggaccctgctgtccttcattcctaagattaatgtttttggtaactgccaaaagtgaatgatcggctgctcttgctcaccgctgaattctgttagtacatcagtcaaagcaaagggattgaataaatctgtatgcgggagcattccttggtcaaaaagcaacgcttctttcatctaatcttcctctcgttccttgtattctttcttattataaacaaaaatacagaaagtaagtaattatgtcgctcaaaaaagcagaagtagttgacaaaaaaagcaaaaccgacaaaaataagtagtggaagaatatcaacttttcttgtatttggctataaagtaagtgataaccaaaaggcataaaaagtgatagatgcaaaaaaataagtacatgaaacaaaaaaaaggagtgggagctctgtgaatatcaatgaaggtattcctgccaaaattaaggttcaaacaaaagttactcaaaacaatgaaacagaggactttgttttcgatcttcctggtcaagttgttaagatgggagacacgctgtatatccgttacaaagagattcagcaagatggtcaagaagttccagttacggtgaaagtaatgccggattcgcaggtacaattaattcgttctggtgaaactcgaatgcgaatgcgctttgcctatcgagagaaaatggaaaccagttacaagacaccatttggtatttttatgatcacgacctatgcaaacaaaatgcacgtgagtttaaaggatcgtccattttctggtatcatcacgatcgattactcgcttttaatgaaagatgaaaaagtaggcgactatcagatggtgttagaatttaccacctaagcataagaaaggtttgctttttatcctctgtttttgtatgataaggagtagactttgaaaggacgtgtcatacttggaacttagtatttttgatggtttgaacaaagatgaattatcaatgattgaagtggcacacgcaattctggaagaacgcgcagatgtaatggatttttcggatctagtaaatcaaatccaaaactatcttggcaagtcagacagtgagattcgtgatgcattagcacaattttataccgatttgaatattgatggaagttttatttctctaggagataatcgctggggattacgttcatggtacgcgattgattcgattgatgaagaagtgaatcatggcttagaggatgaagaagaggatgctcctcgtcgtaagaaacgcaaaaaagtcaatgcctttatcaatgacgatgaagatgcgatcgactacaatgacgacgatccagaagatacagatctattggtagacgatgaagaagatgaaattgatgacgacgatgacgatgatgatgacgaaatcgcagcatacaactctgatttacaagaaatcggagcggatgcaagcgaagatgacgaagaagtcgttccaggcggaatcgaagatgatctaagcgtgattgatgatgacgacgatgattttgatgatgaagaagaggatgaagaatagatcatagcgatctattctttttttattcaattttccagtgttcacaagcgcttcctttgattcttttctatgaaacgcgatagtataaaattagaaaaagaagaacggaagtggattgttatggaaaaagtaccggaaattaaaatcaagctaacagatgtgactgagcgtttagacgaaggctatttattgctttcagaattacgcaaggaggcaaatgctccagttgtcaaagcacgtcttttaaacaaagaagtgattgcgatttatggaaaagaagcggccaagaagttttatgatccgcgcaatttcaaacgagaaggagcaatgcctaaaattgttttaaaaacattgtttggagaaaatggcgttcaaacattagatggtcaagcgcatgagcacagaaaaacgatttttatggatttgatgaccccaaaacggatggaggaatatcatcgtattcttgataaaaatttgacacaaaaactagatcggcaacaggggcagtttgaattattcgatttggctaaggatgttctattccgttcgatttgtgagtgggcaggcattgatttatctcaattgactaagaaggaagtagatcaattagctgaatatcagatttcaatgatcagctctgctgtaacaaaccctgcgactcatatcaaaggcatcgataatcgtaaaaaatcagaaaaatgggcccaatcattaatcgaaaatgcacgaatcaatcctgttgctggaaaagaagatgtagctttgtatgcttttgctaaagcgacagatgatcatggtgaattattaccgattgatgttgctgctgttgagttgttaaatgtgattcgtccaactgtagccttgactgtttggattgctctgatggggcatgcgttattcagtcgaccagatatttaccagcgtctccatgcagaatttgatcagctgcaggattcattcatacaagaaatgcgccgatactatcccttcttcccaatgctaccagcctttgcaatacaagatgtggaagttgacggatacttaatccctaaagatagctgggtcgttcttgatctttatggaacaaaccacgacgatcgaatgattgaaacgcctgaagtctttcgaatttcccgttacctaggaaaagaaaaacatatttcttatgatgaggagtatgaaatgatcgctcaaggcggaggagaatttaaaacaatgcatcgctgtgcgggagagtggattacgttgcatacgttaagggtcttttctgatcagctagtaaataaataccagttctcgataccagagcaggactggagcattccgatgaatcaatttccaacttatccgaaaagcaaagcactgctaatcaaaaaataatcgatagatcctctctaactaggctaagcagtctagttagagaggctattttgcagttaaaaaagattatttttctgcaatcaaatgttttatgttttgtttagctgtttgaataatcgttaaaactcgttgctattacagagtttatacattaaaagagggctgaaatagataaaattgataagtatctgttaaaaaagtatagcgaaggctatggagataggagatgttaatgattctgtcactgagtttacataggttttcaaaaaactatattttatatgcagttttatctatcaagtgaagaatttcaaaaagggagcaaaaactaatatgggtaatagaccttttagtaaaaaatcaccaaaaatgggtatttggtaggagtccatttgaacccttactttccctaatgctttagtagtattcaaatcaaatattttttcttgatttgaatagttaccgcaagaagggcaagagaatttataaagagttgtttgatttttgggactagatttgttaatacgtacagctccctttatgatttttcggacttcgggtcctaataaggaatagctctgatcacaagaactgcatctaaagatgtgtttagtattctcagaatatgcttgtttattaacctttatgaataattttattactctataaaaaaaatttattgctaatagagaaaatagaaaagttccgatgtaaaccatattgcactcctttgtatttaattactaataataattgtaatacgaagaaatagtgaaggcaatatacaataagtttgctataggagaaattcagggaacaaagctcacttacatggagcaatagcggaaaaattacatagccttaaaatagtcaattaagcagtaattaggaacatgagaataatcaaaagggtataaatgagcaggcccaatggatttctcggatttattgttaagccatagcctattggtctagatacaaataattttttgggctctttgggaactagaattaaaacaaggatggcattcatactaagaaccaaagctatgataataccaatgtaattgatgttcaagtttgctagtaaagtgttttttaaagtgtaaagaatgataagaattatcgctaatatacccaatgctatacctagtactttgttattactcatttaaaaacctccaatgactactcaactttaggatagaactattgtttttgtaagtcaatacgaactagattatcggagaaattactggaaggtgcaaaggagcgtgaaacatggctattaagactgatgtgtttagcatattagacgcacgtattgaaatattggagcgtaaagtagagtggtttgagaaatttggaaatcgcagtaaaaccaaagaggtactagaacatgttattgctattgaacgattgtctgagttaaaaagcgttaaatcataccttgaatacagtgtgcattggcagaactgatgagttattggaggacatagaggaggaatatcatggcatcttttgaaattaattgggaaagaaagcaacaagttagcattgaaattgaggctgaaaccgctgaggaagcatacaacaaatggagcgaaggagattacggcactataccagacgtaaatgatgaagacatcattggaaattatgtcgaagtagatggggaaacctattacctgaatcgatttgaaaaagtaaagttcgggtaacgacaactatcgagtagaaaattcctgtagcaaaggggtttaaattcgttttaaaattcaatttttacgattccttctaattgccataacgacattaagcactacgatatacaacagcaaaaacaagatggaaccaatacaaatgattagtacaggaagaatcgttaaatctccgcctgctgaatcatagctaccctgcagacttgtaggtaacacgagagctaaatttaagaacatcatgaaaagggtactgctaagaattgcagttaaattcaattttagaaagaaattcagtttatgaaacctcttggaagcaaatctatatagtaaatagtgtattgggatgacacaaaaggataacaggaatattagcatgaccattaaataaaaaactccttttcagcatagtataccaaaaaacaaaaaaagagttgagaagttaattctggtaaccacaccattcaaagaggaaaaattgggggaaatacaaaaaatcaaatctaatggcggagatatggaagttcatttcccatttccacttaaatatgggcaatataaatccaatggacgataaaggtaattgctaaaataattgcatcggacaagaagatcgaagccaaaggtagaaaaattcttttccgtaaaggttttactacaaatggcgacaaggtaaatgaacattatagaactattgatattttggatgatttgtaaattcaagagcttcttcaacttttaactcagcagaaataaataatgcagcagcagtaagaaattctttcatatcctgtatgttttcatcatcatggactccaacaaaatgtgtttcatcatttccactccatacagcagctttcgcaattgcttggattttaagaaattttgataaattttcgttaatgacttttcctaaaaaacttatcttttactacttcttcagattcagaatcttgatgaatcacatattctttctctagagcgtcagaaggcaatactcagaaaagggtattggtcattcgatgttccacgggtccgcgactacaagaagtattgggctgttcaattcatgatggtgtcattagcggacaaatcaaaaaatcgtgttaatcgaaatattcctagggttgaatttggaccgggcgtatctaatgttattcgcgctttacaaaaattattgaaggttacgcttgacggtaacttcggttcggatacctatactgatttacagagaagaatgggaacgcttcaagacggagaaaataggattgtgttaaagcgatggagcgtcgattgaatgaaggaaataactaaaaaatagccctcgcttcagcgaggactgcgatctttatttggttctataatatttggtgttgttactctttttgagcgagaacaccaagtatttttttatacaaaaagacatttggttgtcctataattaaatcgctgaacccaatcataggaggcgaaccaaatgtccagtattaagaatatcaaatataaagataattgcctagacaaaaccatcaaacaaatcctaaatattcatgattccaacattacttttcctaaagacgccgtttcaaaagaaaaagtccatgacagaatggccaccgtctttactggtcgactgagctatccgtctcctcggtgtgagtgttgcggctacgactccgtcatccatcatggctacaaagatagctggattcaattactcccttatcaagaggtgtctacctatcttcatctctataaacaacggttttattgtaaacagtgtcaccataccttttcagctaaaacctattatgtcgcagaaaactgttatctctcccaagcgctcaagtttgcgatcgctgttgatttaaagaagaaaatttcgatgaaagatatcgctcaacgttacttggtttccgctaaaacggtcgaacgggtcttggattctttttttgaagaaccacgactgaagcccaattacttacccaaacatctattgattgatgaattcaaaggaactaaggactgtcagggcgccatgtgttttattctcagtgacgcggatacggggaaaatctttgatattttagaggatcgaagaagcttcaagctgatcgcttattttatgcgctttacttatcacgcacggaaaaacgtttctcatgtcgtgatggatatgaatgcgggctatgattctgtgacaaaggtcgttttcccaaatgctcgggtttccattgatcggttccatgtgatccaacaactcaatcgtgcgtttaacaaacaacggataaaaaccatgaatcacttgaaaaagagcgacccgcaagccatgaaaaagtatcgcaagcttaagaaatattggcgaaccattctgaagaaaaatagaaaaatcaattattcttcgctcaaacaatacccgcttttccaacggaaatacctgacggaatcggaagtattggactatttattatcgattgacgagcacttacggacaagctatgatgtgtatcaaaatttgttggatgcctttgatgccaaagattataaagacttttacgaacgcattgatcacttacccacgatgcttgatccagcatttaaaaaagcgattctttacttaaacaaacacaaacaagcgattatcaatgcattaaaatacccctattcgaacggaaaacttgaagggaagaataacttgattaaagtgatcaagagagtggcattcggttttagaacctttcgccaccttcgtatgcgaattctaattcaacagaacctttgcgacattatttgaacaagaaaacaaaaagaaaaaaggaaacgccgaagcatttcctttcagtgatttaatgaaaacaacacgatttgacttagagccctttattttagactaatagtaatatcatattcttttttgttattccggtaatcgtttgatgctggattattggcacaccatttcaaacgaatttcactaacttctttaatctcttgcatttcgggaataacaaaataaattgatccttttttttcacattacttagaatatcaccgctcacactacctccaagaagtagctctgccgtaacttgtcatagtcaaaccacaaatcatccacaaaatatttgtaaatcaatgtatagcataaaccgctgtgttaagccattttgtataaaatcgttctttgatgtatactgaaaacagttaaaaatacgcgccctgagggaatcgaacccccgtctcaagaaccggaatcttacgtgatatccactacactaagggcgcaagcacgattattagtttagcatattattttaaaaaaacaaggggaaagtatatgaagtttcaacaaggttattcgcaaaagcagcagcaaacccaaaaattagcgatgacacaggagctgcagcaggcgattcaaatattacaatttaatactgaggagttgcaggactatgttgaaacagtttctttagagaatccattgtttgacgtagttgctccgaaaatacaaagtgatttaatgcaaatgcacagtggtgcagttaaggaagaatccttcattcaaattgccgatcaccctgtttcgttatttgagcatttaatcaatcagatacatttgaattatcgtgatacctttattcgtgagattatgctggtcttggtagagtatatcgatgttaatggatatttgaaagttgatgaagaagaaataaaggatgagttaaacgcgacagatattcaatatctggatgctttaacgcttttgcagcaattagatccgccgggtgttggtgcaagaaatttacaggaatgcttgatgctccagactgagcaagatgattatgcgccagaactagcttatctattattagaagaatcctttgatgcgattgcaaagaggaaattcgagcagattgctaaagaatatcaaatcagcttgccgcaggttcagcaaattttagattatattcggacattgaatccattcccaggagcaagctttggcgggcaggattccaattttatcattccggatctcactttagtaagaagagaaggacgattagttgtattatcaaataagcgagggcagctaaggctgaattttcaggaaaattattttaatcgtttgaaacagcaagcggacgaagaaaccaaaatttacctgaaagaaaaactccagcaatttgaatggctgaacaaaacgctgggacagcgaaaagataccattttagaggttggaaaaatcattgttcagcatcaagccgcgttctttgaagaaaagcagggggcattaaagccgttgatgcttaaagatgtggcgaaacaattggaagttcatgaatcaacgatcagtcgtgcggtcaatggaaaatatattgaaactgactttggtgttttcgaactgcgcagcttttttgtcaataaagtcaatgatgaggatacctctgcggatgaggtcaagcaattaattgcatcgttcgttgagcaagaagataaacgtaaaccgttatctgatcaaaaaatagtggaattactcgcagaaaaagagcaaaaaatctctcggaggacggtcgcaaagtatcgagatgcgttaaatattcccagctcttcgaaaagaaaacgttttgattgagccaagtaaaaaaacttggctttttccttgcgtataaggcgcaaaactgttacactttgtcatgtaagaaatcagcaaatttcaaatcagtaatttgagtttcttgcattttttttaaaattcatgggtcgctaaaagtctatgagggactacttaagtccaacggaggaattcctttgttaagtgaattaagagtacttgaagcaatcgcccctgatgtgctagaggttgtcaaaaagagatatcgcattatgcagaatattttttggatgcaaccaatcggtcgaagaaacttagctgattcattaggtcttaccgagcgagtattacgtggggagacggattatcttagagatcagcgtttgattgatgcaacgaagagcggcatgttattaactgaaaagggcgaggggctgttacagcatttagaactattgatggaacagtttaccggaatggatcagttagaaaaacaacttgcttcactttttaagatcgaacgatgcttgatcgtttctggtaacagtgatgagcaggaaaaggtaattggtgaatttggtgagttagttgatgaggctttgcagcgtcaactgccagaaggccgaaatattatcgcagtgatgggcggaactacgatggcggaagttgccagacatgtcagtccattagaaacagtcaaacgacataatctttttgttccagctagaggaggtatcggcgaagccgtatcaattcaagcaaattcagtcagtgccttgatggcagccaatgctcatggggagcatcgtgcattatatgtcccagagcaattaagcgaagaggcgtatcatactctgctgaaagaaccttctatcagaagtgtcttggcgatgattaaagaagccaattgtgtagttcacagtattggccgagcattgcacatggcagcaagacgaaaaatgtctgaagatgagattgttcgtctgaaacaaaaaaatgccgttgcagaatcctttgggtacttttttgacgagaacggagagatcgttcataaggtgccgcgtatcggattatccttagaggatattcaaaagatgccgacgattcttgcagtcgctggtggcaagagtaaagccaaagccattacagcgtatatgaaaaatgctccacaacaaacgtggctcatcaccgatgaagctgcggcaaacgagattttaaaagggacatcccctttaaaataaatatattttttgattccataaggaggaaatcttaaatgacagtaaaagttggaattaacggatttggacgtatcggacgcttagcattccgccgtatccaagatgtagaaggattggaagttgtagctatcaacgacttaacagacgctaaaatgttggctcacttgttaaaatatgatacaactcaaggtcgctttaacggaactgttgaagttcacgaaggttcattcaacgtgaacggcaaagaagttaaggttcttgctaaccgcaaccctgaagaattaccttggggagaactaggagtagatatcgtattagaatgtactggattcttcacttcaaaatctgctgctgaaaaacatttaacagctggtgctaaacgtgttgttatctcagctcctggtggtaacgatgttccaacaatcgtttacaacactaaccacgaaactttaactggtgacgaaacagttatctctggtgcttcatgtactactaactgtttagctcctatggctaaaactttaaatgacgaatttggcgttgttgaaggcttaatgacaactatccacgcttacactggtgaccaaatgactcttgatggacctcaccctaaaggcgacttccgtcgtgcgcgtgctgctgcagcaaacatcgtgcctaactcaactggtgctgctaaagcaatcggtctagttattcctgaattaaacggtaaattagacggagctgctcaacgtgttcctgttccaacaggttcattaactgaattagtaacagttcttgacaaaaaagttaccgttgatgaagtaaatgcagcaatgaaagcagctgctaacgaatcattcggttacaacactgacgaaatcgtttcttcagatatcgtaggtatgacttacggttcattatttgacgaaactcaaactaaagttatgactgttggcgaccaacaattagttaaaacagttgcttggtatgacaatgaaatgtcatacactgctcaattagttcgtactttagaatatttcgcaaacctataagatttattttaaacgaaaaagaacattgtctgaacaaggcggggaagcgacgcgcttctccgtttttttcgtaagtttatcattggctcttttgtcaaaaagagttgtataataataaagatttaaaaaaattatttggaggttttctttcatggcaaaaatgacagttaaagatcttgacttgaaagacaagaaagttttagttcgtgtggactttaacgttcctgttaaggatggcgtgattactgatgacactcgtatcaaagcggcgttaccaacaatcaactacattttagaacaaggcggcaaagcaattttgttctctcacctaggtcgtgtgaaaacagaagaagataaagctggcaaatcattaaaaccagttgctgaacgtttaagcgaattattgggtaaaaatgtaacgtttgtacctgaaactcgtggctctgaattggaatcagcaatcgcagacatgaaagacggcgacgtggttgtctttgaaaacactcgttttgaagatatcgacggtaaaaaagaaagcggaaatgacgctgaattgggtaaatactgggcttcattaggcgatgtattcgttaatgacgcatttggtacggctcaccgtgcgcacgcttcaaacgtaggtatcgcttctactggaattccaactgttgctggattcttaatggaaaaagaaattaaattcatcggcgaagctgtggaagaacctaaacgcccgatggttgcgatcttaggtggcgcgaaagtttctgacaaaatcggcgtaatcaaaaacttgattcctaaagctgacaaaatcttaatcggcggcggaatgacttatacattctacaaagctaaaggcatggaaatcggtaactcattagttgaagctgataaagtggatttggcgaaagaattgatcgaagcagctggcgacaaattagttttaccagttgactcaatcacagcggctgaattctcaaacgatgttccaactgaagaacatactggtgatgttcctgctggacaaatgggtcttgacattggaccagaatcaatcgctttattcgctcaaacattagaaggcgctaaaacagttgtttggaacggacctatgggtgtgttcgaaatgagcaacttcgctcgcggaacaatcggtgtttgtgaagcaatcgctaacttgaaagatgctacaacaatcatcggtggtggggactctgcagctgcagctgaacaacttggctttgctgacaaattcactcacatctcaactggtggcggtgcaagtcttgaattactagaaggtaaagaattaccaggtcttgcagcaatcaacgacaaataatcagaaaagtatttcgagctcgttcagctctcaagcagtaagtaggcactgttctacattagctccgcttattgttgaagagagctagctcgtaatactagacaataaaaattcaaaaaggagtttttttaaatgcgtaaaccaattatcgctggtaactggaaaatgaatttaactgcatcagaagcaaaagattttgctgaagcagtgaaaaacaacattcctgctaatgataaagtagattcagtgatcgggtctcctgctttattcttacaagaattagttgaagcagctaaaggcactgacttaaaaatctctgctcaaaactgctactgggaaaatgctggagcattcactggtgaaacttcacctgccgctttagctgatcttggtgtggattatgtcatcatcggccattcagaacgtcgtgaatacttccacgaaacagacgaagaaatcaacaaaaaagccaaagcgatctttgctaacggcatgttgccaattctttgctgcggtgagtctttagaaacctatgaagctggcaaaacagctgaatggatcgaaggacaaatcaaagctggcttagctgacctttctgctgaacaagtttcaagcatggtcattgcttatgaaccaatctgggctatcggtactggtaaatctgcggacgcacaaattgctgatgaaatctgcggcgttgttcgttcaacagttgaaggtatctacggcaaagaagtttctgaagctgttcgtatccaatacggcggttctgtgaaacctgaaaacatcgctgaatacatggcaaaagaaaacgttgacggtgctttagtcggcggagcaagcttgaaagctgactcattcttagctttattagaaggcgcaaaataatttttatagaaaattgcggcttttgtttgcaactgccggcgattttcactaatattggttataagggtttttaaccctttaataaaaacaaattttaaaggagagacaaaacatgtcaattatctcagacgtttacgcacgcgaagtcctagactcacgtggtaacccaacaatcgaagtagaagtttatacagaagacggcgcattcggccgcggtatggttccttcaggtgcttcaactggtgaatacgaagccgttgaattacgtgatggcgacaaagctcgttacggcggtaaaggtgttactaaagcagttgataatgtaaacaacatcatcgctgaagcaatcatcggctacgacgtacgtgaccaagctgctattgatgctgctatgatcgaattagatggcactcctaacaaaggtaaattaggtgcgaacgctattcttggtgtttctattgctgttgctcgtgcagctgctgacttcttagaaatcccattgtacaactaccttggcggattcaatacaaaagttttgcctactcctatgatgaatatcatcaatggtggatcacatgctgataactctatcgacttccaagaatttatgatcatgcctgttggcgctcctacattcaaagaagctttacgttatggtgcagaagtattccacgctttagcttcaatcttaaaagctaaaggtcttgctacttcagttggtgacgaaggaggattcgctcctaaccttggttctaacgaagaaggttttgaagtaatcatcgaagcaattgaaaaagctggctatgtacctggtaaagacatcgttcttgctatggatgctgcttcttcagaattctacgacaaagaaaaaggtgtttacgttttagctgattcaggcgaaggcgaaaaaacaactgaagaaatgatcgcattctacgaatcattagttgctaaatacccaatcatctcaatcgaagacggcttagacgaaaacgactgggaaggtactaagaaattaactgaagctttaggcgataaagttcaattagttggtgacgacttgtttgttacaaacactgaaaaattagctaaagcaatcgatatgggcgttgcaaactcaatccttatcaaagttaaccaaatcggtactttaacagaaacattcaacgctatcgaaatggctaaagaagcgggctacactgcagttgtctctcaccgttctggtgaaacagaagattcaacaatctctgatattgctgttgcaacaaatgctggtcaaatcaaaactggttctctttcacgtactgaccgtattgctaaatacaatcaattattacgtatcgaagaccaattgggtgatgttgcagaatacaaaggaatcaaatctttctacaacttaaaaaacaacccattcatcgctaaatagtagtgaataaaaagctgtgaggaatttcctcacagcttttttatttactcttgatgcaatgcttgaagtgcatgtgcaacagttgggtgttgaatggggcaattggtttgtttctcccataactgctggaattgcttttctacttcaggctgcatggaagtgaagaccagtttttggtttttcaatcgtgctacagagaaataatcagcaaatgtgtcaagggctgttacatcgatacttggtactccgcgaagggaaaagatgattccttctttgtccaccacttggtctaactcttgtttcaattgactcgcagacatgaagaataatggcccggtgatgtagatgactgcccaatcagagcttacatcagaatgaggcagtgccattctttgccaatcaatttcttcagtgacgatagaaattcgagcactttttgcaataaagaaaatgcatccgcaaataacaccgatgacaatcgcgatgctcaaatcaaagataatcgtactaagcattgttacaaaaaacaaaaggatggctgttcgatttttttgctgaatcatcgtttttatcgtcgtccattcatgcattcgccagctggttatcagtagaacactggcaagagctgccataggaatttgggacatgatcggagcaaaaatgatcatagaaagaaatagaaaaagtgcatggaaaattcctgccaaacgtgtctgagcgcctgattttatcgcgacactggttcttgcaattgccgctgttgctggtataccaccgaaaaaaggtagaatcatattgccgattccttgagcgatcagttcttgattactgtcgagatctttgcctgtcatgcgaccagcagaggcaccgcaaagcaagctttcgatcatacccagcatcgcgatactgacagcagggaagaataattgtttgatcagagagaagttaagcgttgctatatggagccgttctcctgttaataaggatgtcggaattttcccgacctttgcaacaggaagctggaaaagaatagaagcaaatgtggctaaaataattgcaacgagtgacgctggtaaaaattggctccatttcttgggataaaaaactaagaataacaaaacgatgatgcccaatagaagagtcggtaaatctggcgtaaaattaaagcgatagctcatcaattttgctaaagcactatctccaacggaggtcgtaccgaaaaagttatcaatttgtcctagagcaataatgatagcaattcctgaagtaaaacctgtgataacaggtgaaggaatgaaggaggtgagatttcccagcttgaataagcctgcaatcaataaaatggcacctgcaataaaagtagcaactaagacaccagctaaaccctgggtagcaataatccccatgagaatggcggccatagcgcctgttggtccagaaatttggtaaaagcccccggaaagactgccgatcacaattcctgcgataatggctgtgatcatcccggctgccgcatcggctccgctagaaactccaaaagccaatgcaagcggtagtgctacagcagcgacagttaatcccgctaataggtccttttgaagcttcgccttggaataatggcgaaactcctgttgtaataaatttttataacgcttaatcttaaaacactcctttttcaaaatacgataaaagcccgttaaacaacgggctttagtaaagatttaaacacctcttttactataaaatagtagcaataaaagcacaatggtttttttatcatttttaaagcaggtagcgcttttttgcagagattcagcatttttcatggtactttgatatactagattcaaaagagagatctatgaggaagtgagaaagatggcaaaagatgaattacagcagcatttagacaaaggtcgttttggcgcggcacgcgtgaatccagacgaacaaagaaaatatttggggacatttcgtgaacgttgttttgcaagtatgacgataaaagagatgagaaatcaacaggatcgcgagcacctgatttcggaaatccaaaagtatcctgaaggaaagctgttgataaatggggcagttgatgggaatttacagaatgagtttattgctctagcttctaaaaattctgttgacttcacgatcgttaatgatgctaccgtagattcggaagaaagtattggggtattattagtgaccgatcatgcggtgaatcaagaaattatcgacatcgaagaaaaatattcgtctcaaaatgacaatgaaacagttgaaacaaagccaaagaagagctttttcggtagattgtttgattaaataactgtaagcaacgaaaaattacagttgacattttctcgaagtgtcgctattatattgcttgggcacccttttagtagggtcaagtgtttagtgaattcaaagctccctattcgattggatagggagctttctttgttttttctagacgtttcctgcaaattagtatgaaggagttttttcatttatgacaaagtatatttttgtaactggcggcgtagtttcatcaataggtaaagggatcgtagcagcatctttaggtcgtttgcttaaaaatcgaggattgaaagtgacgattcaaaaattcgatccatatatcaatgtcgatccgggtacgatgagtccataccaacacggagaagtttttgtaacagatgatggtgctgaaacggacttagacttaggtcactatgaacgttttatcgacatcaacttaaatcaatactccaacgtaacgacaggaaaaatctattcagaggttattcgcaaagaacgtaaaggtgaatacttaggggcaactgtccaagtaatcccccatatcaccaatgaaattaaatcaaaaatcatgcgtgcggcgaagatgacagactcagacgtgatcataacggaagtcggcggaacggttggggatatcgaatccttgccattcttagaagcgttgcgccaaatgaaagcagaagttggcgcggataatgtaatgtatatccatactacattgatcccttacttaaaagcagcgggtgaaatgaaaaccaaaccgacacaacacagcgtaaaagagttacgtggtttgggaatccaaccaaatattttagttgtccgtacagaatcaccggtttctcaaagtaccaagaataaattggctcaattctgtgatgtagcgccagaagcagtgattgaatctcgcgatgttgaaactctttattctattcctttagcgttacaagcacaaggaatggatcaaatcgtttgtgatcatttaaaaatcgatgcacctgtagctgatatgacggaatggcgtgcattggaagaaaaagttctgaaccttaagaagaaggtcaaaattgctttagttgggaaatatgtggaactgccagatgcttacatctccgtagttgaagcattaaaacattctggttttgcttatgattcagatatcgaagtggaatggattcaatctcaagatgttacacgagaaaatgttgcggaagtgctaggcgatgcggatggtatcttggttcctggcggatttggcgatcgtgggatcgaagggaaaatcgaagcgattcgttatgctcgtgaaaatgatgtgccattcttaggaatttgtctagggatgcaaatggcatgtgtagaatttgcccgcaatgtggctggcttggaacaagcggattcagcagaaacagtgccagacacaccaaacaatattatcgatttgatggcggatcaagaaaacgttgaaaacttaggtggaacgttacgtcttggtttgtatccatgtaaattgaaaaaaggcagcaaaactgctgctgcgtatggaaacgaagaggtgattcaagaacgtcaccgtcatcgttatgagttcaacaaccaataccgtcaattatttgaagacaagggactcgttttctcaggagtttctcctgacaatcgtttggttgaaattgttgaaattccagaaaataaattcttcgtgggctgtcaattccatcctgaattgatctctcgtccaaatcgtcctcaaccattgatcaaagccttcgtaggtgcgtcattggaaagtaaagaagcaaaatagtaattttgactgaaaggcatagacgcctttcagttttttttatattaaaaaagcaaaaaagttgaaatgtaaaggttttatcggatggttagcagtagcaaagatgggaaaactttgatagaattaacacgttagttaagcatggcttaaccaaatagtaaaaaaccttaggaggaattttttatgccagtagtatcaggagcagaattcttaaaagctgcacgtaaaggcggatatgcagttggtggattcaacacaaacaatttagaatggactcaagcaattctaaaggctgcagaagctaaaaaagcacccgttcttatccaaacttcaatgggcgcagcaaaatacatgggcggatacaaagttgctaaagacatcatcactgatttagtagactcaatgggtatcactgtaccagttgcaatccacttagaccatggtgactatgaagctgctttagaatgtatcgaagttggctacacttcaatcatgtttgatggttctcatcttccatttgaagaaaacttgaaattggctaaagacgttgttgaaaaagctcacgctaaaggtatctctgttgagtgtgaagttggttcaatcggtggtgaagaagacggaatcatcggtgctggtgaattagctgacatcgacgaatgtgtacaaatggttgctacaggtatcgactacttagcatgcggtatcggtaacattcatggtgtataccctgaaaactggaaaggtcttgcatttgaccacttacaagcgatcgctgatgctgtaggtaacgatgttcctttagtattacacggtggatcaggtattcctcaagaacaaatccaaaaagcaatctcaatgggtgtttctaaagtcaacgttaacactgaattccaattatcatttgctaaagcaactcgtgaatacatcgaagctggcaaagataaagaaggaaaaggctttgaccctcgtaaattgttagcaccaggtgttgctgcaatcgttaaagatgctgaagaacatattgactggtttggttcagctaacaaagcttaattagattcttttagtctcggagcaactgttccgaggctttttttgtacaatcaatttattgaaggttttcacggagaagttctctactgcttttgtaagtagttaaaaaactgaaaattttaaaaatacaaataatttcaccgaagtaagaatgcttggagataaaaaatagctacctgatatccgaatctaattgaagcatgaaaaagctgcttattttcttgtgagatttgagaaagcttcctttttatacaggcaataatatgctagaatggataatggtctataaacttcaaaataattaattaggtgaaaataaatgagaaaaatcgaaattcatggtggaaagccattatcaggtaatattacaatcagcggcgcgaaaaacagcgcggtcgcattaattccagcagcaattatggcggattcgccagtaactttagaaggtgttccagacattcaagacgtgcattccttgatcgagattttagagattatgggagcaaaagtgtcttttgaagataatcgaatggtgattgatccaagcaatgttgtttcaatcccgatgccaagcggcaaaatcaattcattgcgtgcttcttattatttcatgggtgctttattgggcaaattcggtgaagcagttgtcggcttaccaggtggatgtttcctaggacctcgtccgattgacctgcatatcaaaggatttgagagtttaggtgcggaagtttcgaatgaacatggcgtgatctatttgcgaacagatgaagacggcttaagtggggatcgtatctttatggatgtggtttccattggtgcgacgatcaatgtgatgcttgctgcggtaaaagctaaaggcaaaacgattatcgaaaatgctgccaaagaacctgaaattattgatgttgcaacattattgaataatatgggtgcgaagattcgcggtgctggtacggacgagattcgaatcgaaggagtcgaggaattgcatggctgtgtccattcaatcattcctgaccggatcgaagcagggacttatttggccttggctgctgcgatgggcgaaggggtaactgttcataatgtgatctatgagcacatcgaaagctttatcgcaaaactagaagaaattggtgtggaaatgaatatctcagaagacagtattgaagtgctgccgtctaagaacttaaaaacggtcgatgtcacaacatctccatacccaggctttgcaacggacttgcagcagccaatcacaccgctattattaaaagcccaagggacagctgaaatcgttgatacgatttattcaaaacgggtaaatcatataccagaattagtccgcatgggcgctgatgctcgcgtggaaggcaacttgatcgtattaaatggctcgaacaaattacatggtgcagaagtagtagcttctgatttacgtgcaggtgcttgtttagttatcgctggattaatggcagaaggcaaaaccacgatttttaatgtagaatacattttacgaggctatgatcatattattgaaaaactgacagctcttggtgctactatcgaaatgatcgacgaggaagaggcggaataatgagcgattatttaacaatggcggaacttgaaaacaagacgctaaaagaaatttatgcttatgcaaaagactttaaaattccttattatagtcaaatgaacaaaaaggaattatcgctggctgtgattcgagcacaggcagaaaaacaaggcttcttttatatggaaggtgtcttggatattgttggacaagacggttacggctttttgcgtccgatcaattatggatcaagtgcggaagatatctatatttcttcctcacagattcgtcgttttggtttgcgaaacggagacaaagtggcgggaaaagctcgtccgccaaaagaatcagagcgttattatggtttgatgcatgtggaaagtgttaatggtaaagatccagaagaagccaaagaacgtccgcattttcctgcattaacagctctttatcctgagaaacaattagttttagaaacaactcccggtcgtttgtctacacgaatgatcgacatcttctcaccggtaggatttggtcaacgtggcttaatcgttgcaccgcctaaagccggaaaaacaacaatcctgaaagaaatcgccaatggtattactgataactatcccgatgtggaactgattgttctcttaattgacgaacgtccagaagaagtgacggacttagaacgcagcgtgaagggcgatgtggtttattcaacctttgatcaacagccacaaaatcatactcgggtatccgaattagttttagaacgcgcgatgcgtttagtcgaagataagcgtgatgtagtcattttgatggatagtatcactcggttggctcgtgcttataacttagtcgttcccccaagcggtcggacattaagcggcgggatcgatccagctgcgttatataagccaaagaaattctttggtgccgctcgtaatattgaagaaggcggaagtttaacgattttagcaactgcgttagttgataccggtagccggatggatgacgtcatctatgaagagttcaagggaaccgggaacctagaattacaattatctcgagaattatccgaacgtcgaatcttccctgccattgacatcaagaaatcaggtacacgtaaagaagaattattaatggcaccatctcgtttggaggaaatctttaagctacgtaataatatgactggcgactccttagaatatacgtcacaatttgttaatttcttgaaaaagacaaagaataacgaccaagttttcaaagctttcaaagatgtttcattcgggggaaaaaccgtgcgaagaaatcaaaaaagataattgcattgtcgaatcattcatgatagtatattcatgttgcaaattgcaaaaataactctgaaccagcaaatgattcagggcaaaggagcgaaaaaactatgaaacaaggaattcatccagaatatcatccagttgtgtttatggactcaactacaggtttcaaattcttgtcaggttctactaaaacttcacaagaaacagttgaatgggaagacggaaacacttacccagtaatccgtgtcgaagttacttcagactctcatccattctatactggacgtcaaaaattcactcaagcagatggacgtgtcgatcgtttcaacaagaaatacggtctcaaagacaagaacgctgcacaataagaaaaacgctgatatatcaacgtttagcagactatctgatagggatagtctgctttttttcgcttttgaccatacttttgaccttctgcaaacttccttgtttttcctctgtggaactcatgaaatgcgcaaaacgatttgccgtttcttctgtctgtcttttcgtgacatgggtgtagatatccatagtcgttttaatatctgtatgtcctaaccgaacttgaacttctttaagagaagctccggattcaaatagcagactacaatgggtatgacgaaaaccatgaggtgtgatacgttttaagttattttcatttatgatgattttcaagttgtgatttacatagtctaaataaagtggcttgttttcttctgatacaaaaaggagctgttcaccattctttgtcggtttaattcccatttttagaaaatattctttttgccttaattgccatcgttttattacttgtaaggtttcagagtctatcgagattgttcgaaggctcttttctgttttgggaacttgaaatttgatttcccatttatcacatgtggccagcgtttgtttaacagagagtgttcttttctcaaaatcaatgtctttccaacgtaaagctaataattcacctttccgtaacccggtaaaagctaagattcgaaaaatcggataaattggatcaggatagtttttggcaatttcaaggaattccaatagttcttccttttcatagtagggtgcagaatagcgctcttcgtcaatccgtttcttacgtttaggacgaatcacagcatccatgggattacttcggatgagccgtaaactcaaagcatacttgaaaacagatgaagtcaaaccaattaagttggaatattttttgtaatagctataccagtgatttacctgtttttgacaataaggaattgaaattctcgagattttcaaatttccaaaaagaggaaagatgtgctttttataagccaatttttgggcgacataggtactttcacgaaccgtgtttttatattgctcaaaccattcatctgccaattctgaaaaaagacgttgtgaatttgtcaccacatcattttcttctacttgtaccatcaagcgattataagctttcttggcttcttgtggtgatttaaaaccacgtttggtggtgtatttcttttttcctgtaaccggatcaatgccgagatatgctttaaacatataggcgattgtgccatttttctttttatatttctttatcataaatttctcccttgattcactcgccagtatatcaaagagaagatatgctcctttcttatcggtatcatagtcagcaacaacaggtaagtcaaggttagatttttagactgtctaaaaatagttttacatcctcacgatcaaagcgagtttctttaccaaaaggaatgacttttagtccatggtcaatccaactatttaggcgagaatcaccaatctttagttgttgttttaattgtttcctcgtcggatagggtggtaactcgtttaagtttgggtgttgggcattttcttcctcaattttttgcttcgttaattgaacaagctcttcaattacttcttgattgaattcaatcggtacattaacagtcatatttttacctactttcgagattcatttttttatttttgtatagcgaacaatgctttcttgaaaatccatcacttgttcaggatttccaccttcatttatcgcactgtaaaatattggacgtcttacaagatactcattggtataaagcacgtctcgatttgtggtatcaaaaggttgatccacgagttgttttgtaacgctgggcactttgaggttacgcgatttgaagaatgcctttttcttgtgttccttcaaatccaagtctttatcgaaatatttactgatatagcgtccacgattttcgatactatctacatcaatcttgtttattttgacaaatccatgtccccagatggtagtaaggcgattgttagagataaaaggaaagtcaaacaggatgatgtgataatggatggcgcctcgttcttgtttttcccacgtggcaaggtatttcaggtttgctttttttgtgtgatagagttcgtagtttagtcgtttgataaattttttgaattcattattcgcataggcaatgtcttgaatgttttctctgaaagtgagggttaaaaattttgtctgattgtcaaagttcatatccacgagtctggcgatttcaaagcgcatattttgatagtatttttgttttcgttttaagctgtcgtattgcccttgagcagataggtcatcatagttttttcctttatcagtagtcgtattttcttcttcataaagccaggctaattctttttttcgttttgggctggtttcatttttgtctgctttttgtttaggagtaatgattgcttcataatcataaatttcaaggtatgtgggagtttcaatgattttctgattataagctttcaaaaccatcactccttgatgtgtgtgtattcagttgtcaaagaaccatcatttttctcctgatgttgttctataaatcaagttaaggggaagtcctgcaaagcagtccttccagcctatgtgtttattgggcggtcttaacggacagaagcggctctatggcgctgcctcgccgtttcgtcctaaccacccaacaaacccataggaaaattagttttgcgtagtggggccttgttttttcggaatcaaagttgccgcatctgccgtggctgataaaccatagctgacaaattgaccgttagagcgaccccaaggtgcaatcactaaattggcaaatgtaaccatggctaaaccttgttgggtaagttcttctggagtaatcacaggagtttcagatttgactttgacactgattttttcgtatcggagttttggtaggatacattcataactccaacctaaaagttctccgtctttttgccagcgagtaacattgacgacttggtattctttttcgagtttttcttttggtaaggtaagatcgttgattttaattggcataatagccctccttagttatatgttgaaggttttcatagaatgttggtagctacctttcttttcttccttcgttaataaaaacaatctaaatttgctttttgatactgatttattcatttttcatcaaaaacttagatagctatctagctgatcttcaacattgatacaatttgatagggcaatcttttgaaaaatataaaagagacgtttgaacgatttcagctttgttatgctggttcgttcaaacgtcttttgtttgagtatttgataattcttgaaaaattagggttttcgaaaagctccatgagtattttagtatcaggatatagaatgattctcaatttttttgttagtagataatttctgatagttaagcaaagctaacaatttctttttccaattcgagcactagattgtcatgcccaactaaatttaacaatagcatgccattttcaacttgctgcttatcattcgaacatatacctaaacgaactgtcgaaattccaatgaaatctactctatttaatttttttgataagttcaaggcttctgtaagaatttcctgactttccaggaagtaatgattctgcatataaatataagcaagattgataagtaaagtagtgtgcaatacatcaatatttgtataaaactcatatttttgtaaagcttgtctcaatttgggtactagctccaggatcgtggggaattctaaatgatataagattgcgtttatcaatcgaatatcatcataggtccagatgtctattttagataatcgattccaaaccaatgataccaattcctttgttgtagcgtcgatttgattaggacaatcagtttctagttttgagagtgcagacagtacaaaatgaatttctctaattttattatcttctactgtctttagaaatttttcgcaacgaacttgtaaattcctgactttcttgatttcagcagtagaaacaatagtgtaatactcattgataatgtcgtttctgctgctatgttgaaattcattacaaatatattgaaattcatcccaagaaacatttacctgatcaagaagatactgcattgattcaaaacttgtattttgattgtcattttcaatacgtgacaatgttgtcctatttatttgattgtgacagacgtccttttgagacaggcctttaccggttcgaattgttttatatactttaccaaaatcccatctcataatatttcctccctgataatgtgtgcatccatgcaaccaaataataaactggataaatgccattgtaaaataaatttgtaaaaataattagagaggagaaaggtaatgggtttattagaaggtatccagcaattagttctttggcttgtaggtgcaagtctggataattgatgtggcattttattaaaggaggaaaattaaatgaaattaagtggaaagatgttaatgggattagtgatgttgtcgggaactgtaatggctcctctatcgtctcaagcggctgagaatgaaacacaagaatgtggaaaaacaatagttactagtaaaaatgtagaagtacctccaactgaaattcaagatttaattactaactttactgaacagaaagaacaaaatattgatcaaaaaatgcgagcaggtcgaacagtaacttttaaacgtgggtccgcactgatgtggtcgaaagatataattagttttaattacagtggaggaaaagttactagtagtagtggtcgacaagaagtgggatggatttttccaaatattgttaggaaaaatggaattacccgttatagtacctctagttcgacacacaaatggcgtggagaaaaaactattggtgctggcgtagtatcaccatggggagacgttacaatttataactacgattttactgactattatggtgtccatggtaatggctcaagtagttggtattgatacagggagtaatgaacctatgttgaaattgagtggtttttcgaagagctttggaaacaaggctctttttcaaaatgtttacatggatttttatcaaaatagaatttactatatttacggagaaaatggaattggtaaaactacattgtttcgatgtattttagggcaagaaaaatttgaaggggaaatttataaagcagactctaatcaattctgtatttttgacgatacgccttttttttcaaatctgacggggttagataatataattttctttactaaaaatatgaagataaaacatcagattgaaaatttagatgttcaatatctaaataatgaattgctatgtaagtcaaaagtagccacctattccctaggagagcggaaaatgttagcattactacttgcaagattgttaaactctaagattctcttgcttgatgaagtgctaaatggactagatcaaagcaatcgtgttgtcctttttaaaacgatagaattcctaaaaaagcagggatcactcattattatgagtggacatgaaaaattgtatctagatatttgtaatgaaaagctatgggtgaaaaataagactatagaagtggtacctgataaaaaagttcggagtttatttgctaacgtaaaagagggtgatttgtttgttgagtgaattacactaccaatggaaagctagagtttatctgatttttttaggaatttcgatatttttagttgtaatgatgtatctatcacagagaaactttttaactagcaacttgagtagtttttatcaagcgatagaagatgcaaatgcaaacggagaagatattaaaggtttgctagaaggtagttttaaaatagatcaactgcaaaatatggaagtaattaataatccactaaaatactatttcatgtcctatcaagctagtttagtagcaatgtttccgaaaaatggagtcaatcaactattatcatcgtcattttttatcatttttccgtgtatgagtggagtttatggggctattatcgcaaatgctgaagtaaagtatggaacacaaaaagttcatcgaacaattatgtcgcaatggcaaatcaatcgctctaaattaatagccagtgcagtgtctattttcagtatattatttatttcgataatggcttttattatgatacaattgttgacttctttaacctttccgatgaaagttgatactattgtgaacctggataatctcagaaaaatttcctatttaagtaatgctttatatcagattctgtttatttttggaattagcttactttattttattgttactttttatttaactttagtgacaaaaaatattttgataagcatatttgtgttaagcgcgtataatttatttttaccaattttaggaagattcgattttaagaatatcgtactcaacatttatctaaaagtttttaatacaaatgcatctacttttaatatagctactggtagtgttatatctcttacatcgtggatagtaattattccttttgttttgttagtgttctatatccttattatggaagtagtactgcttcgcaaagaaaaataaaaaatatggaaagatggaatggcatgttgttttttaaaagaaatttgcacatattaatgctagtaataacacttgtttgcttcttcatagcctatcaacttatgttttctggaatagcgatgattctctttgttggtattccagccgtactaacaggatggttatttgcaaataaaattgtgcatctgactaaagaaatttgactaaaaaatcggtattgcacatgtttcaatcattttttattcaatctaaaagaaagctgatggaggagagatgttagagacagcttctaatttaataattattccaattttagtatgtatgtttgtagctattgatagagataagtggatatcatggaataaaaataaacgaatttttttctttataagttggttagttatggccgcaattttaataggtaataatctttatatctttgttttaggatcaattattttatttttcactgagttctacttgtaattaattgttttgattttaaaaatatgtagggactctttttgtctagcttaaataaaaaacagatgttgtattgcttgggcaagaatattgtttgacggcgttggttattatgaatgccacataatttgttaaacagtaattatgaaaaattgggtaaagtttttttgattaactcaaggagtgatgttgtaggtgactatttatttaaatagtgaactttaggtattccaacttgggcaattagcgcgcttctaatcggtattggatgaactcacttaagaaaatgccttatccaaaaaatgagatactagcaaaaatagttgtaggattttattttatgatgcaaaagaatgcaggtgctgcaaaatattcaactaaataactaaaagatggtgacttattgatgcgtttcttaagactatttctaaaggaacatcctttctttagttttctaatactcttgggaatatcaaatattattgggataataattgctaagcttcgagatgaaaaaataagtaaagcaggtatttatactataatttttacgagtatcttgggatttatcttagtatacaaatcaactaaaagtaataaataggtgacttgaaatatctagaattctctttattgaatttctagatatttctttaatccaaaagttactttgttagaaaatcgagttgaaatgctagataacgaaatgaaaattttagtagaaccctagaggtttaaaggaaatgaagaaaaaatttctgaggtaatgattcagtatactgaatataaagatgatattgaagaatgaaaattaaatatatttgcttaattcgttatttaattattgagaatagagagtgatatgggatatatgagtaaagaatttaaaaataaagttaaaaaaattctatctgtcatgattgtaagtggcattatattagcaggcttctcaatttatttaattataaaacggaagtatttaattggaatattgagtgggttgttttcgatatgctttattattggatggatttgtgtgttaggcgatttaagccaggataacaagtagaaataagtagtgaagtattttttctaaaacattagcgtactgcgggtgtctttttcagatagtagctaaatgtgaatactagagatcacttttatttctgttatcagattctatatgtgatggtgtatattttcaaacttataaaaacagcatctgaagataaactgataaattgtttagagaattatcagctattgacttttgatggggtctcaaataaaattttaatagtgtgtggctagattttgtacttgtgtttcgcaagttttgacaaaattgctagggagaatagccttagtaatccgcaatttatgatcctttttctacgcagtgggcctaatgagtagccacgcacgattctttttgtaggaggatactatggctagtttcactgatattaagactcaagatgatttattcaaattattgaatattcctaaaaaaaatatgacatatttactttataacaaggaagaaaagggtccagagaatgcttatcatacatttagcatactcaaaaaaaatggtgataagagagaaatagatgctcctaatgatgagttgaaatttgtgcaaaaacgtctagctattttgttatgggctaatcaaaaaaaatcatggagattaaataatactaaacctaatatttcacatggttttgaagaaagtaaaagtatcattactaatgctaaaatacatagaaataaaaaaatagtgctaaatttagatttggaagatttttttccaagtattcattttggccgagtgaaaggcttttttgaaaagaataaaaattttaaagttccaaaggaagttgctctagttattgctcgtttagtttgttataaaggaagattgccccaaggagcacctacgtcaccaataatttctaatttaatatgtagaatattggattttaggcttttgaagttagctaaaaaatatagattagactatacaaggtatgcggatgatttaactttttcaacgaatagttcttcgtttgttgatgaagaacagttttttttagataaacttgagaaagaaataattcgtgctggattcaaaataaatgctaaaaaaactagactgcagtttagtaattcacgccaagaagttactggtctaactgtgaataaaaagctgaatgtatccaaagagttttataaaaatacccgagcgatggcccataaactctatacaactggagaatttctgatagatggtgagagtggcactataaatcaactagaaggtagatttgcatttataaaccaattagataagtataacaatggtttagagtatgaaatttcgttaaacaaaaataatatagagtaccaaaaatttcttttatcaactataaaagtagaaaataatcatcaaataatgttactaaatttaaactcaagagaaaaagaatatcaaaaatttttgtactacaaatatttttatggtaatgagatccccaccatagtaactgaaggaaaaacagatataaggtatttaaaagcagcattgaaaaaaatgtataaggattatcctatcctaattgaaaagaatggaaatgactataaatttaaggtgcattttttgaaaagagtcaataaaaagggaaataaagatatctctagattaaagtatttttttaatttacccattgacggtgctgatgctatgaaaaatttgtataatttttttagtgataagaacaataaattataccctaattatcttgaatatttcaattttttaagtacaagtaaacctagtaatccaacgtttttcatttttgataatgaacttaataatgataaaaaaccattgaggggatttattaattacattaacgaaaagaaaaatatgcaatcattaaaagataatggatcattaagagttacagaaaacttatatgtattaacaaatcaattaattggcgaagccgaagaaaacgagatagaggatttgtttgataaaaaaacgttagaacacaaaattggaggaaaatctttttcaaagaaaagcatatctgaaaagaataatttctatggaaaagagattttttcgaaatatgtgctagataattttgaaaatatagattttgaaaattttcgccctatgttaaataatttaagtagaataatctccgattatggtaaataaaagtatatataacacagtaaattttgtattcaactgtaaccatcgtggttcaaattggtttaactattgtccacagaaatcctttttaattgattttgatgtaatatggatactcctaactccttgatataaaaggagttttatagattgagagtctaaaaaatacgcttgcttcttctttgaaaattaatatataggaaaaatgttaagtaaagaacgctagggtatataaatatttttactgaggtaaaaataaaattggttattttattcggcgtttacagttattctagtgtattcatgatggaaattttaccgaaaacactggtaaatataggaatcgaaggggagtatataattatagaacctttacaaaaagtttcgttcatattgctttcgcaagaatctgctgaagcaaaacaaattattcatcaattagttaattcaagattcaaacagcaggaggaacttagcatttctataataccattcttatcctcggtctgtgatggctggttatcattctttcaatcacaaaatatagacatggaactttcttttattgaaaatatttctttcgataaacttgtaaagtcaacacgagtcagttataaattatattcggataaaaagcaaaataaaattaataataagcttcaagatgatggattgaaaaggctatatttattaaaaacggaatacaattttatacaaagaaaatttgttgagttatttgggcagagagatttaggcgtatttacattggatggtattccttatggaaatacaagtcaacttagtatctatttagaaaaaataatagattttaattctgcgacatcattaactaatttacaaaagaattcagctctttttttgactaagtactctgaatgtatagcatcattgattaattgtgtggtgactccgtcctttcaaagtggtatcgataaaaagaagaccttaattttagaattaaatagacttagtcatcatgattattttttttatgacgaacaaagaaaaaatctattgggtggttgtttacctacaaatactcaattatttttattcaatatactttgtcaaaataattttgtaaataaggtgctacctattgtttttcagacgtccggagcattgtatttcagatcaaaattacaaacttaccttgttagtgttaattgcttatctttaatactaaaaaggtattcatacaatattaataaaaatcaaattagtaatataaaaaatataattgaagaaaaggagagaatcttcacttttgaaaacaagttgagaaataatatatttcactacgacattcaggatgttccaatatctatatttaatgattcgcttcattattttgaagaaatgctagaatattgtactatgatagattttaattctttgatatcaataatagatcagtcgttcttaatgattgatcagatcattagagatttgattaaatatgaactttgatgtaatggaataatttatattaaaaatagtatttagggtatagtgagatcagggggattgatttgagagtgaacttaaatatcgtagatatattgaatctaccaattaaaatattatcagcactgtccttatcaagtggtttaatgcttctcttaccaattgaatttctaaaaaaacttcatctaacattttttgttaataaatacggattcataattggattagttttcattgtgtcgtcagctattttaactgttactttaattatccaaatatttaacttcttattgaaaaaaaagaatataaaacaattttataaaactgctgaaaaacgactaagaaagttaagtccatatgagatatgtattgtattaagtttatttgaaaatgaaaattatacgaatttgttacctatcaatgatggagctgtaagaaaaattgaaagtgaaatgattataggaaaagcaactaatcaatatatggtatccaacttaaatactgctaaatttccgtatttattacaaccttgggtagttgatgaattgaaagaaaaggaggctcttttagcttattttgaaagtactgctgaagaatttttaaaagttgacgaaaataaacaattaatttatgacgcacttattaaaaaagcggattatttttgggaatgagttagcttatcaatactaattatatgctttaaaagattttttttactggctatcttattaaatgcaaaatattcattcgatttctcaatatgctagaaacgatagtattctattgtcgaaagaataagacaatatactggcgagtattttttgaccatacttttgaccttctcaatcaaaatttactggggtgtattagattttgtaatttgtcaataatcccatatctaagctgttttctgactatcaggtaccaccagaaagcaatccagctctcaatacggtctcaaagacgccaacgcagaggaaaaataaaaattctgttcaaacagactttagcgagctttctatattgggagctcgttttttgtgtattcaaaaaaattgatttgttggaatacctcaaagattatttttgttatactggtactgtgtttaatgaacgtttaaaatgattaggcgaggtgcgaaaatgattatcaattcatcgaagaaggcattacctttatttaatcagctacctgaagtggcggataaaaaacgggcgagaagtttttcagataagaacccgcttttttcttggcatgccaattacttcaatgttaaacgaaagaaagttttattattggttaatgatttgacgtattttccgattgtattaatcggaatcgacgctcaaactaagaagcagttagggaaaattattcccgcagcaatcgaagaagtattccagactgctggaattcctcagacaaaaattgctgaatatcttgatttggctggtgatatagaggtaagtgccggatataatcgtgtgattactggaatcattaataacatgatcacatccatggaatatcatggaacgtttaatttggatatattggtggatgttaagcatagtctttacttagcagattcttcttataaaagtgagtttccgctagataatttacgagaagtttttaagaagcccttagttcttcacgatgtttcgcaagaagatgtagagaaaaaatatgtggtagaaaaaaattggaaaagtctagctgacttcaaaatagttgatttttctgatgaagaatatgattcggcgttggcaaacaatcgcttgattcttgcagcgtttcaacaataccttgaacagcatgaaaaattaacaaagaagaccgtaaataagcatctaaccaatattgaagattatctcagcgggtatttaattttttatggctatgatttagcagtatctaattttgaggtgattagcgacttctttagttggggagctagaaaaaatgtctggatcagtgaaagtgcggttaagaaggccggctcatctatgaagaagttctatcaatttttgattgcagctggggaagtgaatgaatcagctatgccggagattcgagagcaactcgaaattggcgtggatgatgggatcatgacactagaaatgatggatgattggtattagtctataaattttataagtctaagaagaaaagcgagttcttcttaggcttatttttttgctggttaatcctatgtcagattaattgttgaataggaaaaattttgatatgtttggttagtagaataatctatcgatgaaatcaggtggaatgaaaatgtataagaagagttgcgggattattgttttgttgtgtcttttttcgcttttttctgtaaaagtagaagccgcgcatcagggactgactatcgagcagcagaaggaagcgcttgagcgctatcctcatttttatcaggcggcattttctgacaaagaggagaatactgattttggtatgtataagattccaggactatatgagacgaaatcacttaatctgggaacgaatgggattgttaatagtcgtacaatgacaccgcagggaatagccgtgacagaaaaatatttattgatttcagcatacagtcacgatcatcaggatcattccgtaatctacgtattagatcgtcaaacccatcgttatattaagacagtcgtcttgccgggacggccgcatcttggcgggatagcctatgatccaaagcataaacgagtgtgggtcacaactggtggaccgcttgccggtctggcgtccattgatttgaaggagttagaagactatcagcttaaaaaggacagtgtcatttcataccatcagcaactagcattaaaagaagtgtctcatgcttctgcgctgacgtatacatctggtgttttggttgttggctattttactttgaatgaatatggacgcatggcgacttatcggttaaacgatcagggagatttaacgattgcttcacatgaaaagatctctagttttgatcaaggagaaagggtgcattcaggcgtaacacctgttcctgcatcgcaatttgctcgttctttgggttcgtggaaaacgctggatatgattcaaggcttgactttttatcaagattatttattgatgtctcagtcttggggacctgatcgtccaggtaaaatttacttctttaacctggataaagtggataaatttttctcgtttaaggatgcagaattttccatcgatacaccgccgtatgtcgaacaaattacagcggtagatgatcagctgtatacactttttgaaggtggggcgtggccttaccgaacgagaaatccagtattagttgatcacgttatccaattaacgatcaaggagttactttctaaatagcttgctgctggacaaagcttcctttttattaacgtatctgaaagccaaagttatctggagtttcctatcttggaaactcttttttaatacgccctaatcatgaaacgtgtttcaaatcgtgaaacgagttgagttgtaagcggtatctgtttatttttagaaaagtgcctcgtatactgaacacatcataaaacaaaggagatagaatgatgaaagcgaaaatcatggatagcatgcaaaagttttcaaaagccatgtttgttcctgtgttgatcttaccgatcgccggtattttaattgcgattggaaacgtttttacgaatccgcgtttgatcgagaaatttggctttttagataatccgatcacaatgggattcggtagtatcttgtccgcagctttgctgccagtgttaacaaatcttggagtgattttttgtgtaggaattgctctaggattagccaataagaaaaaagcggaagctgcgtttactgcattacttgggtatctagttttcttatatgcaatgaacaaatttatggaattaagagatatgctagtcgcaccagatcaattacaaggatcgggacaggcattagtcttaggagtacaagtgttggatatgggcgtttttctaggaattattctaggtattgttgttgccttgatccacaatcgttttattgatacgacctttaataatgcctttcaagtttatggcggtgctcgttttgtttttatcgtattgattccagtattggtattggcagctattttactttcatttatctggcccgtcattcagcagggaattgacggcttaggcggagtgattcaaaagacaggtaactttgggatattcctatacggttcgttggaacgattattgattccaaccgggttgcatcatttgatttatacaccatttctgtacacctcacttggcggtgtggcagaagtcggcggtcaggtctttgaaggcgcacgaaatatttatttcgccgaaattgctgatccagctgtgagagtgttatcccaaagtgtcatctgggatgctcgtgggatttcgaaaatgtttggcttgatcggggcttgtctagcgatgtatcaaacggctaagccagagaataagatcaaggtgaaagccattctgattccagcagtagtcacttcgtttgtggctggagtaactgaacctattgagttttcgtttatgtttgtggcaccggcgttgttcgtcattcactcagcattgagcggattaagtatggtggcattaaatatccttggctcgcgggcgattggtcctaatgggtttatcgactttttactttataacattccattaggtacagagaagacacgttggccgatctatcttttagtaggagttgctttcttcttcatttattacttcattttccgattcttgatcgttaaattcaactttaaaactgttggacgtgaagacgaggatcaggagaccaagctgtattcgaaaaaggattataacgagaaaaaatcctcggttccagctgatggtggattagtcgctcccacatcagatgacgagttatcagggaagattgtggaaggattaggcggggcagaaaatattaagacgattgataattgttacactcgtctgagattgaagctggaaaaaccagggttagtgaatgagggcttattaaaaaatcagacccaagcaaaaggggtcatcagcaatggcgaaaatgtccacgtggtttacgggttaacagtcccgcagatccgagagaaacttgaaaaatatttaggcagagacaatggaggagacgaatagtgatgaaaaaattttcagtagtgattgccggcggtgggagtacctttactccaggaatcgtcatgatgatgttagataatttggaacgttttcctttacgaacattgaagctatatgataatgacggagatcgacaaggaattcttggtgaagctttagagattctattaaaggagcaggcaccggagattgacttcttatatacgactgatccagaggttgctttcacggatgtcgatttttgtatggctcacattcgtgtaggaaagtatgcgatgcgtgagaaggatgaaaaggttccattgcggcatggcgttttcggtcaagagacttgcggacctggcggaatcgcttatggtatgcgcagtattaccggaatgctggaaattattgattacatggaaaaatattcgccggaatgctggatgttgaattactctaatccagccgctattgtggcagaggcgtgtcgtgtgttaagacctgattcaaaagtcttgaatatttgtgatatgccggtaggaacactacgtcggatgtcacaaattattggcaagaaaccagaggaactagaagttcgctatttcggattgaatcattttggttggtggactagcgtgaaagataaagaaggacatgagtatcttgatcagattcgaaaatatgtttctgaacatggctatttgactcaaatcgaagtagacacacaacatacagatcctagctggcaggagacccacaaaaaggctaaagatattttagcggttacgccagcatacttaccgaatacctatttgaaatattatttgtatcctgattatgtctttgagcatatgaaggatcatcccgattttactcgtgccaatgaagtgatggaaggaagagaaaaaaatgtcttcgatcatgcgcgacaaattatcgcgagtcaatccgcggaaggaatcgcgtttgatattgatgcccatgcaacatttatcgttgatctagcccgcgcgattgctttcaatactcatgaacggatggtgatgatcgttgagaataacggcgcgatcgccaatttcccagatgatgcgatggtagaggtgccttgtattgttggaacggatgggccagaagcattggctcaaggacaaattccagcttttcaacaagctttaatgttccaacaggttactgttgaaaaattagttgttgaggcctatgtagaaaacagctatcaaaaaatgtggcaggcactaacgttatctaagactgttcctagcgcaaaggttgccaaagatttactcgatgatttgattgccgaaaacggcgatacttggccagaattatattaatgataaggatgtagcagtaacgtctattgagtacgttgctgttacaatcctttttttaaagaatttaaggaggattcaaaatggaaatcaagatgactgattagggtaaaatggggattactgaagaatttattgcaacatcaccatcaggcacagtctatatgacaatgagcttgcagagattgctcaagttttttatcaggggtcaggcattcgttcttggctaatggaattaatcgaaaaatctatcgcgaacctgttgatatagagaagattacagaaattatcccatcttctggcgaaggaaagtggacagcggaggaagtgctacggttaaaagtaaacgtaccaataattactcaaccacttatgatgcgctttgcttcggaggattgtgataagataagtgagaagcttgttgcattattgcacagtcattttggcggaaacgcctttgtaaaggatgaatgattttgtcagtatttttaggaatagatattggaactaccgctattaagctaggtgtgattcaagagagtaagttgctgtattcaagcgatttgccgcttcaaacctatggagatgatcggataaagtatcaagacggaaatgagcttttagcgattttgcaggcaggaattttagcgatgccgttaaacgtacggcgagaaatcaccaagcttagttttagcacagcgatgcatagtctcatgcctgatgatggtagaagacagatttttttatggtcagatttacaggcagctgagacaatagatcgctttaaacaaacgaaattagctacgcatttttatgaaatttcaggcacaccaatccatgcgatgtctccttttgccaaggtgctttattttcaagaagaaaatttatatccggcagaaactcattggtatggtataaaagaactggttatggattattttacaggaaaaccagtgattgattatgcgacagcttctgctacgggaatgtttgatttgagaaaacaggaatggaatggggaaattctcgattatcttggtttaaaaaaagagcagttggcaacgttggcagatacgagtcaaaagtttacaatgctgaaggagatacgtgagctatttgacttttctgaaaatatccaagtgattgttggtgccagtgatggtacgttagcagcatatgccagctattactctactgggcgctccgccagtttaacgattggtacaagtgccgcggttcgtcaaataacgaacacgattcatttggatcgaaaaaaacaaaatttctgctactatttaaaaaaagagttgttggtatgcggagcaccttcgaataatggtgggatcgttttagcctgggcagcgaaccatttagcagagaatcccgcaaccttctatgaagcactcccagatttattgaaagaaacagagataggcgcaaatggattacgcttttatccgtttttaaatggggagcgtgcaccatattggagtaatgaaatcaaagggggatttcaagatttgacgctgcagcatacccgaatggatatgatacgaagtgtaattgaaggcgttttgttgaatattcgtcagttagttgaactcgtggcaaaaaaagaagcactatctgttagcggaggtttttttcaaactcctgtgttgggacaattagcggcaaacatctttgggactacttgttattacgcacaacaaaatgaaccgatttatgggttatactatttgttagagcaaccgaatcgaatgcttgaggaggatcaagaaacgttctttcctgatccgctaaaaagtgctgcttataaacaccttgctcaggattatttcatctaattatttttgagtaaattcttgaacaatatactccatcaacaatagcagcttgccgaaaaaactattgtatttaatattttgactgtctaagggacgttcatctgctacttcaaagataattgtagcagattctgttgcgcgggattgactattgccagtaaacaaaatcgtcggaatcattcgttctcgtgaaaaatgcattttttcgatcactttttgtgtctcgcctgatttagaaatgacgatcagcatgctgatattatcggcattgttgttgatgatccctgaagaatcagcagcactgacaaaaagagttttgattccattgacgagtagctttttgtaaagatattcagcgatgatactagaaaaacctgtagcataaattgtaataaattttccttgattttcttgatagatttttttcatggcttggattgaaggtgcaattttctctgttggaatcgaaatatcgacagtcgcctccacgagttgattttgtggctggtattgattttttagaaaataaaataattccagataaccggagaattctaatttttgtgctagacggacaatcgttgctggtgaagtatagagtgtcgcagcaatttttctcaatgaaacgccctctagttcatttacatgagacgctaaataagtcaaaattatccgatcgttatccgatagttgtttacctttagttactatttctagatccatttctccacctcttaaagaaagtaataaagcccttactctgacattatacactaagaaaaaagaaaaaaagaattggtcattttatcatatttaattaaaataaaggaaggatgttcgacaaatgtttggtttattcaaaaagaaaagtagtgaaatttacacccctgtgaatggggaggtggttgagctaaaaaaagtaaatgacccggtttttagcgaaaagatgatgggggaaggctttgccgtcaagccaattgatgggaagattcattcaccaatcaaaggaacaatcaaatcagtttttccgtctctgcatgcattaacaatcgaagccgaggatgggctggatctcttaattcatatcggactggatacggtggaattgaatggtaacggatttagttctattattcaagaagggcaaaaagtaaaagctggagatcttttggtgcaaattgatcgaaattatttggcggaacacaaaaaggacgatatcgtaatcgttgtttttcctgaaatgaaagacaaagagctagagacatcgcttggagaaaagcaggttggagaaatcgctgcggtgataaaataatattgttatcctaactgccgattgcgaatcaataatcgcaaaagttggattggcagcaagcattttcaatttttaaaaaggattctcgaataatgttggttttcaattttaaataattgaactgtcaaagagctgcttcttattgaagagggagcttttttgtggtagttaatgccgagcaatgaatgtcctgagccaatttctgaacataccaaataaatctacgtcaaaattaaagggaacttattcgataattcttcgacacaaatccctacaatcatttctttttccttttttttcgatttttatttctttttgaacctactttacctctatttccttgagattttttagcgtccctatctattttgttcttttcccgaccgttgtgactttttcctttagatttatcgtatcgtaagtaggaggtgtcttctttctggagatactcggcagccttttttgcagaggagttattggcgactgtcgttttctctcctttagaaggcgaatttgataaagcctctttggctaaatgagatttggattctacttttgtgataacttcattatcgtaaggtggcgttgaggcagcaacagtttgtttttgtggcttttcattttcaagcaaagcttttgaggttgttaactcttcaatagtttctttagaaacaagttcctcttcttgaatctctttatgctgtgcatcaatccggccttcatggctataaaaattcaaatattcagcaaagcgacgagcagtgggagactgaaaaactgttaagctcgttaagattttcaagacgttagcggtttcattttctaaatgtttagggattcgtttggtattacgcagcgtccaggtatgttttttgccatttgaatcattgaagcttgatatcaaggtgtactggtattcggaagagtctggctgttcacggttctttttctctaggaatttttgatagagacaggtttccttggtaaattggtggtattcgtttttatttttaaacagacgattcacgacgttttgccactcttcaagtgaaaagaacgactcaaaaaagacacagtgcttccgcaatgtatcgttcggtgttgtggtaagaaaaatctgatgaataagctctgttaatgactctagtgaaaaatccccgacgcataaagcatctcgcaaaagaatcgcaaccaaatactcaacaacctgtgaagcattcttagtttgttcaaagtatttcgccacacgtttcataagatttgtattcttcattccaaaaatctgcctttgtccaagcttcacagtatccatccttgatttcctccacttacgattgatttgttatttgcttatttcctaatgtatcatgttttcgagattataataacattggacgctgtatatgaaaaggctttctttgagtatttttttcttttaaaaattttaaacgttatgaataataatgtttttaaggattttcatgatatgttggattttattgtaattgctaaaaataactatgatagaaatatgactgagaattgataaaagtgttcgtcgttcatttgcttttttatcactactaattttttagttataataattatgaagaataaatcattcaattgttttctgttttagtcaaacttcctaaatattaagaaatcgcgatctatgatcacgatcatttcgcaggcgactacatttagcctgtataatctcgttaaataatcgataaggacgaatctttttctaatcgatccccttatgataaatagagcataagaccaaaaaaatcgcttcctcgttgcaattatctttttaaacctcttttttattcattcgcgtgatttattaatcgtccattttaggcttgttaaacctgccaaaattgaacggtattaacttttctatttgctatacttttgtcagtaaaaaaactcttttttccgattagattacctaacgagaaaaaaagagatttacattaatttccgaatatattatttatatttaaattaattatagtaatcgtaattgatgaagtcaaacgcaaaaaaatttttttatattaaaaaaatgaatatatggagcatttttttgctgtttttataagaatgagtttactgcagaaaagaaatcgttgatttaaagcactttctatcaaaacagaatgcgccgtcaaaatcaccgtcagaaaggaaggttaatttgccacgcaaaggagaaaatatttataaacgaaaggacggacgttgggaaggccgttttatcaaagcacgcgatgaacataatcaaatcgtttacggatacatctacggaaaaagctatcgagaagttaaggaaagattgctagtggtaaaggccaaacatttagagacatccttgatcacaagtccaaaaagcgatgaatcgttagaatattggatacgagaatgtatgactacaaaaataaaaaaagaagtgaaaccttctacctatacaaattattttcggttattgaggaatcatgtttttccactacttggatcaataaaaataggcaagcttacgaaggataatattcaaatgctgatcgaaatcttaacgatgaaaggtctagcggtcggaacgattcaccttatctatactgtactaaatagtaatttaaaaattgcagtcgaagaaggctgcttggtaagaaacccttgtgagcaggctgtattacccaaaaagacaaagaatcgagttcgtgctttatctataacggaacaaaaacagatggaaaatttgtttattgatacacccgctggagtgccagttattatcgctctttatacagggatgcggatcggggaaatttgcggactaaagtggagtgatatcgattttaatgagcaaatactatttgttcgacgaacgattattagagtgtcagatgagaattcgctggatcatcgcacgcaaattatcgaagaaaaacctaaaacattagaatccattcgtgttattccgttagcaaagaagttaactactttcttaactaagttacatgccaaaagtaattctgaatacgtagttaattttaatggaaaacgcatagaaccgcgtacagtaagctatcggtacaaacggatactatccggtagcggcttagataatttttcttttcattcacttcgtcacacctttgcaacacgttgtttggaaaatggtgtagacgtcgctagtattagtcgattgttgggacattcatcggttaagatgacgctagatacatacacagattcaatgatggaaaaaagaagagaagcagttcaaaagcttgattctcttttcgaaaatacgtcgattgcaagctaaaaaagctctgaatgagctttttttttaagactataagccgtcatgaaaaacgtcatgactacgtatcgacattaatctgccaaggctaaacatatctatttcttattaggtaatctaataagaaataaacactctacagatagctattatagtgaagttttagagaatgacaaataattagatttagggggtaaaaaaattgaaaggataagaccaatacccatgtttttttgtctgatttacgcatcgctattaaaaaaaatatccttaagaaaaggaaaggtgtggttcaaatgaaacctcttttaattttaactaaaaatatattatttgagcaaacgctacaaaataatttacaaactttaaattatgaagttttctgctcgaaaattttatttgaaaaacttttacatcgaattgatacaactaagattgacgataccttcgccggaattattatcagtgataccattaatgatgatgaggcacgacaattaatttctgaatttcgaaaaaacaaccttttctttcgcaaggtttcaatgatccctagtgaaactgaacgtgacaggatagaggaattaggggttgacggatggatcagcgataattcacctcttgatcaattaagagagtatttagtgacaatattagctgatgtacgcaaaggagaacgagaaaagacattggtctttagtcaacacggagaactgatacacaaagaaatacaaacaattcttcatgtattgtcaaataaagagaaaatcttcttccagaaattaattgattctaatggtgagattgtttcaagggttgagatgtcagaggcgatttggggtgaatgtcctaataactctcatcttgcacaaatgtctattctggttaaacgaatcagatggaaattaaaagaactgggaattgaagaagatattattgagacgacttggggcaaaggctatcgcttgaatcaaagcagatttgagagcgaaacaactgaaaatgaatattatctattaaataagtagcagatttcacttctgaagaaaaacaaataaagaaacctgtatgctataatttactgaaaatagcaaagtgcaggtgatcaaatggaaaatgtgaagggaacttgtttgtgtggaaagaatcaggtaacaatcaagcactacggaaattttgtctatagttgtcattgtgatatgtgccgaaaaatgtcggctggtccagtaatggcgatcgatcccgaaaaaagtgagaatgttgatttaaagttagcggaagattctgcgacatattatcgatctaatgaagaagtggaaagatgtttttgctctacctgcggaacctacctattttggcatcacttaggcagagatcatttttgtttaaatgcggaattatttccagaaattattagaaatgctgattttagcttacaacttttttatgatcgcaaaccagattattatgattttgcgaataaaacaacatgtttagatcataactttcaagaagtgagtgattaagtcagttagcctttctatgaatcatatagaagggctttttagcataggagtataattcaactaaaaatgttagtatatgatcgtttttgtaaggagaagacaatgaaatctgttttattaattggacaatcaaacatggcaggtcgtggttatctgacggatgttcctgcaatttataatgaaaatactgaaatgttgcgcaatggtcggtggcagatgatgactgaaccgcttcattttgatcgagaagtctcagggattggaccagctgcatcgtttgcggccgcatggtcacaagatcatcctgatgaaaagctaggcttaattccttgtgcggagggaggaagcgctatcgatgagtgggcagaaaaccagccgttaactcgtcatgccctcgttgaagcgaaatttgcgatggaatcaagtgaactgatcgctattttatggcatcagggtgaaaatgatagcttaaatggatactataaggattacgctgaaaaattaaaagccgtatttaatcatttccgaaaagaacttggattagcaaacttgccgattattgttggggaacttcctgattttttgggaaaaactggatttggtttaagtgcgattgagtttaaggaaatcaatcaggaaatgtccaaagtcgtagcggaagagcaaaattgttatttggttagcgctgagaattttcaggcaaatcctgatggcattcatattaatgcagaatcacaaagacaatttggtattcgttattatgaagctttttcgaaaaaagcgaatgtctctcaggctatcggagatgaagacgaaagattaattatcagcgatttattaaaaaaaatgctgaaatttctatataatgattttaagtgaaaaagcacttgtttttcatgcttaacgttgaaagcaggaagaggaagactggagctgtgataaaagttgtgttactgcttctttttccgaacaaacgatgttccaaaaggaatttctatcacaacccctttgaatatatcgtttaaaccaatgaattctaacggaaacagcacaatttcttataatatattagctgtgcaaatattaagggtggtcgtgctttatttttttagtatggttaatttaaccattgataattatctcgtgaaatctaattatacgcatttcccattgaagtattgtatatgaaactagacttaaataatgaggtggctaatggataaggaacaagcaaagacgagaatcagacaggcgtatccggaattaacgattgaaacaatggaaattttaggtaagggatttgatagtgaggcatttctgatcaataaatcctacgtgtttaaatttccaagacatgctagagcagctagaaatctatataaagaggtagttgttttaaaagaaataaacgacaaattacccctcaaggttccagaaatatgttttattggaaaggcagaaaagccgaatcaactagattttgtcggacaagaaaaaatcaaaggggttccactcgacgccaaaattttgacaacattgactgaagaacagaagaacgaaatcgcgaaggagttagctgcttttttcaaaacccttcatgaaattgagctttcagtatccttagaaggacttgaggtagataaaaagaccaaagcggcatatgaatatgaagtgattcagcaggcagcatatcctcttttgaaaaaatcggtacaacaagagattgacgaggtttataaaagaatcttgcaacagaatttcaacgaaaaaaaatgtctcattcacaatgattttggtgctagtaatgtttattatgatcaaaagacaaacaccatttgcggcttgattgattttggcgatatagcgatttatgatcgtgatatggagtttatttgtcttttgtttgactatgaagaaggcttttctcaagcgtttgtccacaaaatgctaggttattatggcattgaaataagtaatttacaaaataaattggacttcattgaattttataatcagcttgaaaatgtgtatttaggcaaggagtttgagatagaagaattatttgtggaaagcattgctgagatacaaaatggtttgaatggctatgaagagaatattttagttgatgataaaacaatttattatatgtaatgagaagaagctgcgttgtcataacgtagcttcttcttagcttaatttgattttttttgaagtactcctaaaatgagctcagctacgcagtttaaaataattaaaggttgaaaatagttagcctagttctttaaaatcaaattttaaaaagcatttgtctatagcaatagaaatatttttatcagattgaaaaaaatctagggttgattttgctggatgaacttgttactattcaattgtagaaagcgtttgcaaaaaaagaaaattgcgggagagtgcagctaatctgccaccgaaggtataagctgtgaaacaagctgaattcacagtgaacatctcaggtaaacggaccgtaattggataaaactctggagagcagaaatgcgccgaagaagcaacctcagggtagagggaatctttcaggctagtgacagaggacaacggcacagtgtgttgttgtcctcttttttgggtctaagcatattcttcaagggctaataagcgtccatcatgtgaaaaaaaacacaatcagaaactgggtgagtaaatgattatcataacaaataatccaatggtgaaggaaaaaatgagtgaacttgctgtcttttgctatctagagggcgattatggagacgttttggcaaaggtaaagcaacagatcatcgaaaagcatgtccgcttgctgtcgcacccgttaagtggaagcatcaaaccaaacgaaacctattataaaacgatttttgcttcagagaccacttctcaatacatcgatattgagagtttagaatttattgaatcagcgatagccgtctacgaaaaatttataaaaaacaaacagcgccctaattggtccttagcggtgctcaacgattttgcttttgtagatttttatatcgcgcagagtacgttggatagaatgggggtggctagataggattcaacggtctgcaaccaataagaactgaggtgaataaatgaaactcgaaattggtaacattgaaatcaaggaagttgttttaggcgaagaagagaaaattgaaaatggcagattaaccctcgatccttcgaaaatcaaagagttagttttggaagacgatcgattaatcagctgtgagatcgaaatcgctaaaccaggcgatagtatccgtatcacaccagtcaaagatgtgatcgaaccaaggtgcaaggtcggttcaacaaccggaatttttcctggtgtgatcaataaagtggatgtggttggcagtggtcgtacccatgtattgaagggctgcggcgttatgacagtcggtaaaattgtcggctttcaagaaggaatcgtggatatgcaaggccctggggctgaattaacgccattttctcaattgatcgaaatttgtttagtgttaaaaccgcaagaagagttagatcctcatttatacgaagaagcggcacgttttgcgggactcaaaatagctgattatatcggcaggttaggtgaaaaggttgagcccgacagcattgaaaccttcgaaacattacctttgttagaacagatccagcaatatcctgatctgcctaaaatcggttatgtgtacatgctgcaaacacaagggcttttgcatgatacgtatgtttatggaacagatgtcaagcatattgtaccaacgatcctctatccaacagaagtcatggacggtgcgattatcagtggtaactgcgtgtctgcgtgtgataaaaacacgacgtatcaccatttgaacaacccagttatcgctgatttgtataagcagcatgggaaagaaatcaattttgtcggtgtgattgtcaccaacgaaaccgtttatttaaaagataaacatcgttctagtgattttgttgcaaaattgagcgagtatcttggattggatggtgtgattatttctcaagaaggctttggaaatccggatacagatttgattatgaattgcaagaaagtcgaagaaaaagggattaaaacagtaattgttacagatgaatatgctggaagagacggagctagccagtcgttagcagatgcggataaattagccactgcagtcgttactggcggaaacgcgaatgaaacgatccaattaccaaaaatggatcgcttgatcggacaattagattatgtcgatgtcattgcaggcggctttgatggcagcttgaaacaagatggcacgattgaagttgaaatccaggcaattaccggtgcaacaaatgaacttggttttaacaaaatgtctgcaaaaggcgtttaaatcataatagggaggaaatactaatgactttagatttaaaaaataaaaaagtcttagtgatcggcgaccgtgatggtatcccaggtcaagcaatcgaagcttgtattgagggtaccggagctgacgtaatattctcatccacagaatgtttcgtctgaacggccgctggggcaatggacttagaaaatcaacgtagagtaaaagaagcagcagaaaacttcggagcagagaacgtggtcgttctgatcggtgctgccgaaggagaagcagctggattagctgctgaaactgtaacgaacggagaccctacgtatgcaggtccattgaccaatgaacagctaggtttagctgtatatcacgctgtagagccagaatttaaagaagttgtcgactcagatgtttttgaagagcagattggcatgatggaaatggttttagatgttgatgacatcattgaagaggtttctgaaatgaggaatcaatacgggaaatactaataataaaggagcgtcttatgactaagtttaaagttgttcactacatcaaccagttttatgctggaattggtggtgaagaaaaggcggatatccaaccattctcaaaagctgaagtagtaggaccaggtcttgcttttatgaattcatttggcgatgaggcagaaatcgtcggcaccgtcgtgtgtggcgacagtttctttaatgagaacttggatagtgccaaaaaggatgtattagatcggattaaacaatttgaaccagatatcgttattgcaggaccagcgtttaatgcaggcagatatggtattgcttgcggggaagttgctcaagcagtcatgtctgaacttggtattccagcagtgaccggtatgtatgaagaaaatccgggagttgagatgtacaaaaaggctgcctatatcgtaccgaccagaaacagtgcggctggtatgagaaaggcggtacctgtgattgccagtcttgcgttgaaattgttgaaaaaagaacaagtttcgccagaagcggataattactttgttcgttatcgtaaaaattttcaggatgaaaaacgtggttcagcaagagccgttgaaatgctcgtgcgtaaattgaaggacgaggaatttacgactgaatacccaatgcctgaatttgataacgtcgcgccagccaccgcgataagtgatctgtcaaaagcgagaattgcgcttgtaacttctggcggaattgttcctaaaggcaatccagatcgaattgaatcgagtagtgcatcaaagtatggaacctattccctcgagaatgttgatacactaacggcagattcttacgaaacggctcacggcgggtatgaccctgtttatgcaaatcaagatccaaaccgtgttttgccattagatatagtgagagaaatggaaaaagaaggcgtgatcggcagcctgcataattacttctatacaacggttggtaacggaacggctgttgccaatgcgaagaagtatgcggctgagatcgctcaaaaattagtagcagatggagtcgacgctgttattttaacctccacctgaggaacctgtacgcgttgcggtgcaacgatggtgaaagagattgaaaaaacaggcttacctgtgattcacatttgtacagttgttccaatttcacaaaccgttggcgcgaatcgaatcgtaccagcagttgcaattcctcatcctttaggaaatccaagcctaagcttgaaggaagaacaaaaactacgtcgcggcattgtcgagaaagccttaaaggcaatgactacaccagtagatgaacaaaccgtttttgaataaatgaatactgcctgagtgaatcatcactcaggcggttaattgagcagaaaggagttcacttaatgtatgacgtaataatcatcggcggcggtcctgctggattaaccgcggctatctataatgcaagagctcgtttgaatgttttacttttagaaaaaacaaaattagggggacaaatcgtttcaacccatgaaatcgccaattttcccggatcaatcaaacaaactgaggaagaaacctctggaccagaattgatcaaacgtatggctgaacaggctgaacaattcggggctgaggttcagcttcggaaagaagtaacggatttagaacttgatgggaaaatcaaaaaaatcacttgtaaagatggtagtgtctacgaatcccatgcagttatctgtgcaaacggtgcgtttccaagagaaattggctgtagaggtgagcgagaattagctggaaaaggcgtctcctattgtgcaacctgtgatggggccttttttgaagatatggaagtttatgtaatcggaggaggaaactcggcggttgaagaggcaatgttcattaccacttttgctcgcaaagttcacattattcaaaatctgagtgagttaacggcagacgcaattgctgtcgaacaagccaaggccaatgacaagatcgactatattttcgattccgtagtagaaagtatcgaaggcgacggaatggtcgaggcgatgacaattcgtaatacgaagaccggtgagttcactcgttttgaagcagacgaagaggatggcttatttggaatttttgtctttatcggcaatgtgcccagcaccaaattatatgaaggcaaagttccattaaataaatacggatacatgattactgatgaggcgatgtgtacgccaattgaaggcgtctttgcggctggcgatatgcgaccaaaagtattgcgacaagtggtgactgcgactggtgatggtgcgatcgccgccttctcagctcaaaaatatgtagaaaaaatcaaaagggaggtaccaacagcatgatcgagttaactattgataattttggtgtagaagtattggaacaggagacgcctgtattagtagattggtggggagagacctgtgaaaactgtctagctttgatgcctgatgtggaagaactgtatgaccagtacggagataaaattcgttttacaaaatttaatacctcgcagaaaaaagttcgtcgtttttgcattcaacataagattttagggctgccggttatttcgatttataaaaatggtgaaaaggtcgatgaagtagcgaaggatgactgcacgaaagaagccatcgaagaaatgattcagaaatacatttagggcgggatgcttatgaattatgcgactttacgtggagcgagttatgttttagttcatacaccagatatgatcgagcacaacggcaccacacaaacaacagagaaaattacaaccccagatagtccatatttggcaaatctatatgatcatatccgtagttatgatgaggtagtcaattatgcaccaaaccaaacatttattggaaatctaagctatcaagaattgaaaaatctgccacagccatgggtaaatcattccattgaaggcaaacgtgaagggaaattcggcgagattatgccggaattagaattttacggcttattacagattgccgatgtttttgaattggtgcatttagaagaagcttttgcagaagaagttcgagcggctttggcggcacattcgctttttaaggaggatgtagataaaattaaaagtgaaaaaccgcttgagtggatcgaaaatgagttggctgaaaatgatgccgaaggattatactatgatcgaaaattagtcggctgtgtcagtcctgctcaccagattgacgcgaatttaaacgctcatgtgatgctggaaaatcttgtggtaaaggcaagtggtgttttggcattgcgacaattgatagaaaagcatcagcttgatcctaaagaaattgattatgtgatcgagtgcagcgaagaagcttgtggggatatgaatcaacgaggtggcggtaatttcgctaaatcgatcgctgagttatgcggctgtgtccatgcgacaggttccgatattcgcagtttctgtgctggcccgacacatgcgttgattaccgcagcttctctagtagcagcgggtacgcataaaaacgtcgtgctagtagccggcggggcaactgccaaactaggaatgaacggaaaatcacatgttggcaaaggctttccaattttggaggatgtcttaggtggattcgccgcactgatcagtgaaaatgatggcgtgcatccgattttgcgacatgatttgactggtaaacatgaagttggcagtggatcgagtcctcaggcggtgacaacggccttgatcgccagtattttagaaaaggctcaattaaccatcaaagatgtcgatgtttactcagtagaaatgcaaaatcccgatattacgaaaccagcaggagctggggatgttccgttagcaaacttaaaaatgattggcgcaatcggcgttttacggaaagatatcgagaaaaaagatttgatgacttttgttaatgaaaaatcactagttggttgggcgccgacgcaaggacatattcctagtgggattccttatttagggtttgccgctgaagatttggttgctggtgagaaaaatcgtgccatgatcgttggaaaaggttcgctctttttaggacgaatgacaaatttatttgatggtgtatcgatcttaattgaacgaaacaatggaaaagtatcagatgagaatcagcaggatttagaggaactagttaaacgagaagttgcgcaggccttgagaagtttcgctgccaatctttcagtagaatagaggtggattcaatgtctgatcaagtaaaagaaacagtcaagaaagtgtttgaagatttggcgactagtctagaaaccggacgaatggagtccagactcaaaattggcttgaccattgatggcagtgagctcggtatggctgtgatgaaacaggctgcttataccagtaagcaaaagaatctttttgatgttgtattgatcggaagtgacgttgactgggcgaaagatttcgagcactactcgacagccgactgtcaaaaggaatcctctgagttaatggaggaattgctagacagcggagaaatacaaggatgtgtcacgttacattataattttccaatcggtgtttccactgtcggaaaagttgttactccagctcttggtcgtgaaatgtttattgccacaacgaccgggacgactagcggtgttcgcaacgaagcgatggtgttgaatgcgattaatggaattatcgtagcaaaaacttgcggtatcaagcaaccaactattgggatcttaaatattgagggagcaaaaacagttgaacgttcattgactgagttacaagaaaaggggtatgaaattaactttggcgaaagtcaacgtgaggatggcggaaaagttctacgagggaacgatttgttattaagcagcgttgatgttgttgtttgtgatagtttgactggcaatattttgatgaagcttttctcagcaagttcaagcggaggaaattacgaaacgacaggctcaggctatggtccaggaatcggaagaaattatgatcgcaatatttgtatcatctctcgtgctagcggcgctcctgtgattactaatgctttagagtatgcttacgagttggctaaaggaaaacttgatagggtaagcttgacggaatatcggaaagctgatgaagctggactgaagcaaatttgctcagagctaaccgcaactgcagtacccgaagcgaagaaagagattgatccgcctgctaaggagatcgttaccagtgaaattgctgggatcgaaatcatggagttggaggatgcggtaaaaattctgtgggaagctgagatttatgctgaaagcggaatgggctgcactgggccaatcatcttagttaatgagaaaaatctgatagctgctcaaaatgaattgaaaaaagcgaattatttatagtgaggggaccagttcagtaattgagctggttttttgctttgttaaagcaagaagtttttactttaaaggttcattagaattagatggaatgttttaaaaagaatttcaatcccgccttgactctccagttgcggaagagtttagactagattggtaaggggggaatcagatgaaaccattgagattaatcggtctcacacaaaacaatttgcaacatctttcattagagatcgagaagaacaagctgattgtatttacaggggtgtcaggttcgggaaaatctagcctagtatttgatacaatcgcggctgaagcacaacgacagatgaatgcaaattactctgcatttgtacggaatcggatgcctaagttcatcaaaccgaaagcagaaaggattgagaatctgaatcctgcaatcgtgatcgatcaaactcctttaggtgggaatcaacgctctacagttggtacgattaccgagacctattctctattacgtttgttatattccagaatcggtcaaccccacattgggtcggcgagccagttttcattcaatcatcctcaaggcatgtgtcaaacatgctctggactaggccgtgtaaatcaaatcaatcttgaaaaattaatcgatcgtgaaaaatcttggaatcaaggcgcggttaatgatactagatacgcggttggaaattggtactggaagcagtatgcagcggcagacttttttgctaacgatcagccgttaaaggatttaaccgtctctcaatggaatcagttaatctatgggcatccagaaaaggattcgattccacttaatccgaaattggaaggaatctgtcgcaattatgagcggattattttgaagcgcgatctgtccgagcgcagcaaaatgtatgaggaaaaattgaaggaattgttgtatgaagcgccttgtccggattgcgaaggtcgccgtttgaatcaggaaaccttgtctgtgaaaattaacgagtgctccattgcagactgtgttcagatggatatgaatcaactactactgtttctaaatcaactatactatcctgaagtgaaagaggtcatcgatgaaattaagcgacaggttcaacggctaatcgatataggattggattatttacaattagatcggcaaactccgaccttgtctggtggagaagcacaacgagtgaaattggtgaaacatatgggaagcgcgttgaacggcatgttctatatctttgatgaaccaagcaccggaatgcatgcgcgtgatgtttctcgtatcaatcggctgctacaggatcttcgagataaggagaatacggtatttgtggtggagcatgacccagatgttattgcaattgctgatgaagtcattgatattggtcccttggcagggaaacagggcggagaaatcatttttcgtggagattatccagctctacttcaatcagacagcctaacgggaaaagaaatttgtcagacattacccatcaatactgagcctcgcagctggcatgaaaaaatgacaatcaaagaagcgaatttacacaatttaaaaaatgtgacagtcgatattcccaaatatgtattgacagtcatcactggcgtagctggctcaggaaaatctacactaattacaaaagtcttgcccgaacaatttcctaatgaaatctccatcatcaatcaagcaccaatcaaagcgacgaatcgtgccactccagctacgtatttaggtatttacgatgaaattcgtcggaccttcgctaaagcaaacaatgtcccagccggtatgttcagttttaattcaactggagcttgtccaacgtgtcatggcaagggagagacactggtggagttagttttcatggaccctattgtaaatgaatgtgaagcttgtggagggaaccgattttccgatgaagcgttaagctaccgtttaagaggctgtacaattttagatgtactagacatgacaccgaaagaactgcaagatttctatgaagggcttggcagtagaaaattaatcgaaaaacttcaagccatgattgatacaggactaacctatttgccaattggtcgaaatttagtcacactttctggcggtgaacgtcagcggttaaaactaaccaaagcaatcacacaaaatgagtctgtgtttgttttagacgaaccgacaactggtctacatctatcagatattaaaaaattaaacgaactatttcaacgaatggtagaaaacgggaatacattgatcatcattgaacaccatagtgaaattatcaagcaagccgattggatcatagatattgggccagatggtggtgtgaacggtggcaacgttgtttttagcggtgtgcctgaagatttattagaaagcggaacgatcactggtgaatacttgaagaaaagtagtgaaatgatcaaaaactcgatctcctgctaaggcagcaggagatttttgtttaacagaacttggattggttaattttttgcggtccagtctttgataaaaaacagttcacagattataagttaaaaaaacgtttagattgacttttttaaggccacaagttcaaatagtcttagtgaatattctttcattttttaaaagatattggatggatttgtcactttttgaaagcctttttttgttatacttaagaggggatgattgtgatggatcgattaaaaaatatctgttgctatgcacccatgatggtgtacgcaacaccagaagtagaactaaaagtagataaattgtgtttggatatggttacattagccgcaaaaggctggagtgtggatcagttatattattatgttttggcacgcagcagtgaagtaacaggaatagaaatggtattatcggcggattctaaaggattagtcattgtctttcggtcagagcaagaaaaacaggaggtggaagaatatgccagtgaatacttttaatttaagcctcattcatcaaaagatgtgtgatgaatttattgcagatatctggatttttgccattcaaaaatgcatggatttgcctgaagcatttgttgcggcaagagaagatgaacaacttaaatacttctaccgtttgattgatcagaatgaagaaatgtctttgtatgtacatgaagaattgggacttgattgttagtcccgattcttttttcttttcaagagcaattgcttctcatagcagaaggcttgtatacttaagggaataaatccgtatcgggtaaaggtgtgaagaaaacggaattgaaggaggcaaattttatgagcaaaacgctccgattagtatttcctcaatggcagggaggaaataatccaaattatctttttggttctgaattgttgagacatattgttccgcaaagtaataaagcagagacaattcaaatcacagttgatgaaaatacctcaaaagaattactgcttgaaaatggtgtaattggtgggaatagtttattaaaacagctgtcagaggcttcgagggttctaacggaaaagcaacctgaaaaagtcattactttgggtggggattgttccatttctcaagctcccttcgattatttacatggaaaatattctaactcgctgggaattctttggttggatgcgcattccgatatgtcgaccattaatgacagtcaaaaagggcacatgcatgtactggggaatcttttaggtcacggagcaccacagtttgccgaaaaaattcgccaccccttcacagtcgagcaggttatgctcgcggggctaaaatatgaagaactgcgtccgtgcgaccaccaagtcgatgatttgaagatgaattatctcacaccagataaattggtggaggatagttatgcaatcattaattggatgaatcaaaatcaattgaagcacttggcgattcattttgatttagatgtattgtctcctctggactaccggtcgattaatcctggtaaaccatacttggatgtagaaaaatttcttgccccgattggaacaatgacactcgaacaaattgcccggatcattagggatgtttctgaaagagctgaaatcgtagggtttagtatcggtgaatatttaccttgggatgcgatcaatttacgcaaaactttagagaacgtagagatatttaaagaatgaaaaaagtcagcgtggattcgctgacttttttaaacatgatcatcattattcacgatctcatacttgattccatctggatcgttaaaaaaaagagcataataatttggtccatgttgcggaaaaatttgtggctcatctaaaatctcagcaccaagttcaagtaccttttgatagattcgattgacttcatttctagaaggagcttggaaggcgatatgatgaaccgctccgggttttcgtctatggattgtttcctcttgatactctttaagaggtgaacagataccaaaatcataggattgatcgagatattcgataacattcatatccaaatcttctaaatagacgttgatttttttattcaaatcaaagcccaaagcctccatcaacccatcataaaatacttcagccgtatcaatattcttcaccgtaacttgcagatgatccactttcataggtaatgccattcttaactctcccttcaaaaaagctatagtttccaataagtcctgccatcaacagttcgacctaaaattccgtattctatgagatatcgtctaatcgtaacataatcttcgaacatcctcgaaataatctcattgatttctttttcgctatattgtttttcagaagtaaaattttctgcgagtttttgaatgagaataattcgctttttttctttttttggaatttgattggctttaccattttcgtcgagaaaagttttaaaaactttttctctttccttttctgtggaaatgaatcgttcatcagaatcaatgatggaattcgctataaaatttccctgatctttttcttcaatggattccaataaggctaacaaaattttggcctgccgtttcttttctttaaatttgaagcgatgattccttacggcagaagttgtaatattcagctgttcggctatttcctgatcatcaatgtctttattaaacagcgtcagaaaggttttctgtttgtcgcttagacctgtttgatttttatcaagattgagcaacgcgtcaaaagggccgtggtgttcatgttttatatgataaatcattgcgccttctgctcgggctagttggctgttgccttcattaagcgggtagacgaagcgatcatcaaaggtttgatcacaatacaagcattggaaaagaaagtcgcctttttttgaatagcctttttttatttctttgatggttaaatcactcttcataataattcctcctatttaaatgctaatatatttatttatagtttgcaaataaggttgcaaacgtctttaaagttttataaagataagtgcttgaccttcacgtaacgtcaacgattatgattaaatcaaggaggttaccataatgaataattttagtgtaaaaataattgatactttgtcttattatgaagcgtgtctgcagggtcagaaggatgaaaatactttccgctatgagttgatgcaacctttcgaggaaatgtggcggtatttaagtgttcccctcatgccaaaaacttcgggaggctatgatgttttgatggcatcagagatgatgggcatctggacgccgcgaaaacgtagagagttgattgaaactaaggtaaaacctttaaaagacacgaatattttcggagaatgtcgtcaagttatagaaaaaagcgcacagcttttcactgacattggctatcaaataccgatcgaagactttgttgtaaatatcttgctcggtgatccggaaaacagcgtcttgatggcaagtgaagggtatagcggatttggcgggatacctgggtatattttgttaatcgttgttccgaatgaattcaatcgcacacgactaaaatctgctttggcacatgagtttaatcataatattcggtttacctatgagccctttaatcatggagatgtgagcgtcgaagattatttagtgattgaaggcttagcggaggtttttgccgaaacgctttatggcatcgaacatcgtggaccatgggtacaagattacgaccaggaagaattggactatacgatcgaagtaatgaagggtggacgtaatgctcgcggctttgatcaggtttctgcgtatatgtatggggatgaagttgcccgtgagcaggggtatcaacctgtaggactctcaagaaacgctggatatacaattggttatcatctcataaagaattatttgaaaaatactggaaaaacaatagctgaagcgactttgacacccagtcgaattcttgttcaggaatcaagaatttttgattagaggctagaagattttaaatagcaatcgtttttctaaaaagagtatgctatacttttactaattgaatgacactaggggtgcttttgaagctgagattatacccattgaacctgaaacagttagtactggcgcagggaatgtgtgatgtttagaattttgcacccgaccgtttttttgcggtcgggttttcttcagtatgcgtgttttgtgcagagagcctccttttcattcttatgagaataaaggaggttttttatgttgtgactaggagacgttggaagagtcgtatcaagtgggcgtactaaaaaagttaataagaggagatagagaatgaattttacaaaaattgcgcgtcaagaagcagcatcattttggaaaggaagctttgagcatccatttatcacggcattggcagatggaaatttggctccagaaatttttcgctattatttacttcaggatcgctattatcttgaacattttagcaagctttatcatttaattgcggaacaaacaaatgatcgggaagtgcaggagcagttgcaagaaaatgctgaaaatcttaagctaggtgaaatggcaattcgcaaggagttcttttcagaattaaggattactgaacatgagattttgactacaccgattgcacctacagcttatcattacgtttcgcatatgtatcgacagttgattgacggtacaccaaatactgcttttgcagggatgcttccatgtgcctggctgtatcaagaaatcggtgttcgtttgattgacacgggctctcctaatcctttgtatcagcgctggattgagacctatgctggtgaggccgctgctgaagggataaaaaaggagtgtgcgctcttagatcgtctatatcaagaaagttcaagcaaagaacagcagcaaatgatcgacgccttcgtgatcagtagtaaaatggaatacgccttttgggaaatggctgttaaattagaaaaatggtaatgcatcaagagatcgttcgattgtggacggtcttttttttaaaacaatttacaaatcgcataatttatatgttaaaatgcaagttaacacttgcattattaggaggtatgtaaaatgatttcgggagctgaattggttgttaaagcattaatcgatgagaaggttgacgtatgttttgcttatccgggaggacaggcgattgatttgtttgatgcgctttatcagagaaaagaatttcgcgttattttgcctagacatgagcaaggattgattcatgccgcagatgggtatgcgcgatctactggaaaagttggtgtttgtctagtcactagtggtccaggagcaacaaatctgataacagggattgctacggcgggctacgattcctctccgctggtttgtatcacaggacaggtttcaacacagctgattgggaaggacgcttttcaagaagtagatatggtgggaatctgtcgctcaattgctaaatatgccgtaacagtcaggaatcgagaggatttaggaaaaattctgaagaaagcatttgttattgcgcaatctggtaaaccaggagttgtagtcgttgatataccgaaaaacattcagcaggaactcggttcagaaaaatacccaaaagaagtagcaattcgtggtggtcagaaaacgcaaatgatcccattggaaaaactagaaaccgcagctgaaatactcgaagccgctaaaaaacctgtcttgctgcttggaggtggtgttcatcgcgctagagcgtataaagaaatagccgcctttattgaaatgtacaatctgccagttgttagtacgattatgggaaaagggtctttacctagtaatcacccaaattatattggtaatgtaggtattcacggaagctatgcagcaaatcaggcaattttaaacagtgatgttcttttggctttagggacacgtttgaatgatcgtgtgactggaaatgccgcagtgttttgtcctttcacaaagctgattcatgtagatattgatccagcaaccattgataaaaatgtcgacactcaaattgggttagtaggagacattaaagaaatattgccaaaaatcacttacatgctgtattcgaaaaatcatgagaaatggctacaagaaatcaaaaataaggatctactttcgcctgttcacatgaaagaagtaggtttaacaccagaaaaaatcattcagaaaatcaacgaacatttctcaaatgcaatcgtggtaaccgatgttggacaaaatcagttatggacgacccaatttcttgaagtcacaaaagaaagacaactgctgacttcaggtggattaggtacgatgggcttcggttttccagcatctattggggccaaattagggaatctgaaaaaggatgtcctgacaattacgggtgatggcggctttcaaatgaatcttcaagagcttgcgacagtgatgctagaaaaaattccgattattatttgcattttcaacaatgaaagtttaggaaatgttcgtcaatggcaagaaatgttctatgacaaacgctattcttacacgaagttaaaggacgacgacatgtcttatctaccagatttcatcgctttaggccgcagctatggagtagacggtattagaatcactgatgaagaagagcttgaccacgcatttatccgagcaaaaggtgctaaaaatcaaccatttattttggagtttatgcttaagacagaacaaaaggtcttaccaattgttccgccaggtcaagggttgaaggagatgattacttatgcagacaattaaacagaaatggttaagcgtctacgttgaaaacgaagttggcgtattagcaagagtctctggattattttccggaaaattgtataatttaaatagcttaacggttggtgagacagaggtcaaagatatttctcggatgactatcagcctttttagcgatgagcgaacttttgaacaaattaaacatcaattaagcaatatgatcgaagtgatccaagtgattgattacaccgacattcccattcacactaaagaggtaatgtacgttaagctgccttattatgaaagtctcgaaaacgatctaaatggattgactcaggcaaacagatttatcattattgatcaaacaacagatcaaatgctgatcgagtgtatcaatactgatacgcaaaataaccaactaattatcgatctccaacaaagcatttctcaagaaatcgaagtgattcggggaggaagtgtggcgatcgcaagtctaataaaggagtaagtatttcctgtatgaaaaatacgcgaagcaatattatggctgctacaagaaaactaatcgtcgaaaaaggctacagtgacatgacaacaaaagatgttgcaaaagaagcgcaagtaaacgaagtgacgctgtttcggcaatttggcagtaagaaagaactactgttgacaacattaaaagaagccgagtggattccttctgtaaataaggagatttatgatcaatttcaatgggatctaaccagcgatcttcgtttgatgatggaagcgtatctcacacaggttacgccagagattgtccggttttccttaggccttcgcgcacaagaaatttatcaagaaacgatgccttatattgagaaaattccaacagcctttattcagacgctggaggattatttgattagaatgaagtcaaaaaagcaagtcaaaatccatgatccgaaaaaatcagcggaaattattttttctagtatgataggctttgctttcctgcacgcctactctagcagcgatcagtatgaaaaggaagtggaaatctttatttctgatgccattgatcaatttattaatggcctcatttgaatacgaataaaaaaacacctgaatacgctgctcaattgttcggacagtttgtattcaggcgtttttttattctaatgagtttcctttcagaaatgaacggattttttcttttaatagcttggtctttcgcggattggcacctttagtagttaatgcaatcccaaaatccttttctttaatccatgccatgttgaaaaaattgctattgctttgattggttgtatcatttacgagttgtcgcggtgtcgtttcattcaaaacagcttggttgactgctggattatctgtacaaataaaaataacttgaaaaccagtggtatcaccatattgaaaggaacgttcccgcaataaaacttttccacttttctttgctgttagtaaggtatcagaaaaattcggcgcgataaccgtgggttttacacctgcttcaatcaatccgcaaacttttcgagtggctattctcccaccgccgatcactaggacagaaaactgctggatatcaattaagattgggtacataggcgtaactccttagtcaatgattttacggattttcgctgttttgtttagacaaattcactagagcttttttctgttcaaagcgaaaatagatgaagtgggaaagaacaccaaagaatactggacctaaaagcaaggttgaaaagttcagataatttcctaattttaaaggttcatatatttgaaaggcaattgcaacaaaaatacagacacaaacgcttatggaaagaaaataattcaggtaattatttttaataatcaatgactgtttctggatgatttttttctttaaaaagaaaggaaaactagctgcgacaataaaatatggaatcgctcgtgaaacattcgtcatgtaggttaattgattaaataaatctgataaaaaagtattactaaatgacaacagcccaataaataaagaaatcagcaaggcttggatccaaagtgcattttcaggcatttgattcctattcagtgctgagaattttggccagaaaactttaggggtactctttatcaagcttttcaatggaccatagcttattgagctaagaagactcaaatatgccagccccattgtcagggcggtgtaacgaataaaaatctgagtcaataagtgcgtgtgactaactgacaggttgaaactgacagccaatgtcttggccaattgttccatgacaccatacattagatttcccaaatgaagagacgtttcctcccgtaagccgtcaatgttatttgcacagctccaaatgataatgccgctaacatataaaaataacacaacaaacgaactgataatcacggctcgcggaaatctgctgcggctttttttggttttatcggcaagactcgcaatcgtatccaatcccccaaatgcggtgatcgaaaaaatgaaaaaaggcagctgtgaaagcaggcggctcgatgattcttgaaaaaagcttggcacagttagactatgatggatatttattgaaaccagctcgggattcttaaaaatcaaaattaaattaccagataacgaaaggattaacaaaccaaccatagcgtaaccgctaatatgcagaaaacggaaaatgacttggaagccacgtttgttcatccaagtgatacctattactgccaatatagaaaataacgctaaccatatttgagaagaaacaccgaaccaattcattgacgtagttatatcttgcccgaagaacagaatagagattggaatgagaatcttcataaataaactaatcatccaaatgaagtagctgctataccataaaaaaacagttgtgaaagctgccttaggagaaagggactcttttaaccagtcatagatcgctcctgagcgatgtgcgtactttttggtatactgcgctacgatcagtgcgtagggaataaaataaaagagggcactaataaaaaaccaaataagtgattgacttcccagcataaaaaatgctgagatcatactagaaaatgagtacacagtagtggtaatgatcaaaatcagattttgtgaagattgttttttagtcatcgtccgctccttaaagtcttttctccatcttattttcttttaaataaaaagacaagatgaattttgatttaaaagaattacttcatcaaaaaagcagtagataaaaatgaatgaaaagattgataaatcaatgatttttcaaatcgaataataaataataacaatatattgctttgttttaggttcgaaataacaaaatttggctgaacttcagcgattgaatagctttcctttgattgctttattaaaattcaagaaaaacctttaaccagtagttaaatctgaaaatagcagtattttatattgcttgagcagggaaataagattctgaagactatctttttagaatacatatcaagattattgaaggacacagttctcttctacattctagagcgaatgatgatgacgattgcttggttccgtgaggatagtacatatttcgatcatcatttttttaaatcgtcaatcagttttaaatatagtaatattttgctcttacctttttcaaaatagcacaatgtggctgagttatggaaaatagccaagaataaggagaaacgtttgctataataaagaaaaattgaatacttaataactgatcaagggaatgaggtgaaaatcctcaacagcccctttctactgtatatgcggatgaactctcacaagccacttttcgggaaggcgagatagtaaatggatgcaaagtcaggataccttgttcagggattaaaaaataattggattgggaagattattttgctaacggtattatttggtgtatttagacaaataaaaagcgcggcgagaccatcttttctggactcgctgcgtttattttttttggttatcaatcagaatttactgagaaaacaaatagtatatcaaaacgaataaggatgtcagttcaacttttcgcaggttacttaaaacagaaagatattaagcaataagaatcaaaataaagctcaagaactttagttgaatgatatacgacattcgaatcgaactaattttacttgaaaaattaatacattaaaacgaataaggatgtcagttcaacttttcgcaggttacttaaaacagaaggatattaagcaataagaatcaaaataaagctcaagaactttagttgaatgatatacgacattcgaatcgaactaattttacttgaaaaattaatacattaaaacgaataaggatgtcagttcaacttttcgcaggttacttaaaacagaaggatattaagcaataagaatcaaattgaagctcaagaactttagttgaatgatatacgacattcgaatcgaactaattttacttgaaaaattaatacattaaaacgaataaggagtgaaacatgatgaagtattcaacaaagaaattggcaacattagcaattctgctggcgttatgtgtgattggggcaaacattaaaatcctaggttcaatcgcattagactcttttcccgcatttattggtgcaatcattcttggccctgccgcaggagcatttttaggatttttcggacacatgatctcagcgttactgtcagggtttcctaatactttgccaattcatctgattattgctgtattgatggcggcctgtatgttcttttatagctggacgcgcaaaaagttgcaaagaaataaggtcgcagcttcgataatttcgatgctggtggcttacgtaatcaatgtaccattggatttgctattgctttatccattgatggggccggttgttttcatgcttttcgtccccctgaccttggcgacagtcgtgaatttaactttatctgagattgtgattctaggaattccacaaaaatataaagaagcaatctttctaaaataatcaagaagcggagtcgttgttatggcagtgaagcatggaggaaatattcaagaaatcagtgaattatatcagatagataagaaagagctaattgattttagtgcaaatatcaaccccttaggtattccccaaggagtcaaagcaacactaacgaagggcattgcggagctagttcattatcctgatattcgataccatgcactaatccagtcaatcgctgattttcacgagatttcagcagaatttgtctatccagccaatggggctgcagaagcgatttttatgttgggaagaacgcttatgctgaaaagactattattgcttgcaccgactttcatggagtatgaagcagcttttagtcaacaaaagactgaatttagctattttaatttggagcaacgcaattttcaatggacaattgcagaattgatacaatcagcgaaggagcaacaagttgatggcatctgcctctgtaacccaaataatccaactggtcaaatgctgaaacaatcagagcttgaggaattgtctcaattttgtcagagaaatgagatagctttaattatcgatgaggcatttgtagattttacaagggaggaatattcgcttgtttcttcaatcagcactaatgaaaacctctacatctttcgatcgttgacaaaaatgtttgcgattccaggtttgcgtttaggctacttgctaactagtaatcgtgctgttctagctcaaattgaagcgaaaactgtgccttggcacattaatacctttgcagatattgccggacagcaagcattgaaggaaacaagatttattaaggatagtcagcgctatatcgcagaggaacgaaggtttttagaaaaggggttggctcaatttaaggagctagaaacgttttctagtcagacaaactttattttcttgcgatatcagggttcgggttgtctacaagaaaaattgatccaaaaaaatattctgattcgaaattgtaatagctttcatggcttgtctcaaaaatattatcgaattgcagttaaatcaagagttgataacaaatccttacttgatgcattggaggcgattttatgagagtaacggcttcttgtaccggttcatgcggagaattaattcaaggctggctaggtaattcgcaaaaattagttagttatgggattgatcgattttctaaagtaacgcttcaaacgggaattgcttctaaaggagctaaaccaaaagtcgagaaagcgatcaataaaacgctggatcacttaagaataccgactgctaagagagaaaagctatctttcgtgatcaattcagaactaccgatagccaaagggatggccagtagtacagcggatattgccgcagcttgccaagcaacgactgcttactatggaagaaagattaccagagatgaaattatcgacatttgtttggcaattgaacgtacagacagtattcttttcccaacacttacattgtttgagcagaaaaatgggtcagttagagagagcagcggatgggctccccatttttacgtggttgttttggagccagaagaaaccttagaaaccgaagcttttcattcacaagtgaacgagcgcttaatttttcaacagcgagcactctttacagaagtttatcagtgttatgtaggggcagtgagagaaaaatcgttgcaaatgcttggagaggcggcgacacagagcgctctattaaatcaggaaattttagctaaaccctatttctcagaattgatgaagcttagacagtaccatcagtggttaggagtcaacgttgcacatagtggctcagtagttggaatcatgattgaaaaaccagaagatattccagcagttctagaggtgataaagaaatccaatgtgtcacgttggtattccaaggtcagtgttcatcaaagctgctaccgaggagtagaactgataaaagcgaggaaaatgaatgaagaagctgatgatcgccgctgtttccagcggctcaggaaagacaacgataacgcttggtttaatgaaacttttgcaaaatcgcgggtatcgagttcaaccctataaggtcggtcctgattacgtcgataccgaataccacacgcgtattaccggaaacccttcacggaatttggacatgtttctagttcaagataatgcacgaatgaaaacacttttcgaaaaagaagcgggaaatgcagacatttgtgtaattgaaggagtaatggggctttttgacgggttaggggtagacaaggatttttgctccagtgcaggagtcgcaaagcagttggattgttccgtattgctggtagtgaatgggcaatcagcttcaacatctgtggcggcagtggttaagggattcgtcgattttgatccgaaactaaacatttgtggagtcattattaataaagttgcctctgaaacacactatcaattgattaaaaaagcagtggaattgtacaccgatgttcctgttttcggatatttgaagcgagaaaaaggagtagagctgccttctagacagttaggattggtccctgatcgagaaatcaacgatgtgacagaaaaaattcagcaggtagcagaatccttagaagcgacctttgagcttgatcagttattagagcggcttccgaatgagaaaatccgatatacaccgccgtattatccgcaatttccggaaatcaaggtcgcatatgctctagatgaagcattccatttttattatcaagacaatcttgatttgctgaggacgcatggcgtggagctgctcacctttagcccaatgaaggatgaccatcttccagaggcggatttgtattattttggtggcggttatccagaagaatttgctctggagctttcaacaaatcaatcaatgcgcagcaatatcaagaaaaaacacgagcaaagcgcctttatactagctgaatgtggggggttaatgtatctaggatctgcctttactaacgatgagaagaactatcagatggtaggtatttttgaaggagttagtcagatgacatcaggtcttcgaaaatttggctactgctatggcgatctgaatcaagagactttgcttggggaaaaaggaacaacagtagtagggcatgaatttcatcattcaatttttcaaagtaatgaaccaacagttctggaaatgcgaaaggaacgcgatggagaagtcgtgaagagatggactggcggttatcagaaaaagaatacgtttggcagttatcttcaccttcatttttatcaaagtgaagattttcttcagaatctgctggagaaagtgaggaataacagatgatctactggattattgttgctttcattttagatttattgattggtgacccttacagctggccgcatccaattaagctgattggcaattttatcgcttggtttcaggagaggttcacccagacaaaaagtgatcaggaaaactatcgttgggggattctattgtggttggtaactgtttttggatcaggattggtaacttttatccttttaaaacttagttttctaattcatcctgttattggcatcgtctgttacatttatctgtcttatacaacgttagcaaccagaagtttatcgctagaaggtaaaaaagtttatcagaagttagtcaacgacagtctcgataatgctcgtaaacaggttgcaatgattgtcggaagagataccaaagaactaacaaaagacgaaattaccaaagcaaccattgaaacaatcgctgaaaataccagtgatggtgtcatcgctccattactctgtctatttctcggaggaccaactttggctatgatgtataaggctgtcaacacgctggattcaatggtggggtatgtgacaccaaaatatcgcgcaatcggctggttttccgcaaaaatggatgatatttggaattttatccctgctcgtttgacttggttctatttactaggagcaactaaaatactgcgcttaaatacttcaaacgcttggaaagttggaaaagctgattgtcgtaatcataaaagtccgaatagcggctatcccgaagcagtggtcgcaggtgcactaggaatccaacttggcggcacgcatctttatcatggtgtggaaatttataaaccgacaatcggagtctcacttcgttcagcgaagccaaaggatatattaactgctaataaacttttgtatacaacagcgattttgagcgtaactgtatttagtgttactgcaatcatcatcaacaagtactttttataagaaggagaaaaaagcgtggactatataagaaatcctcaattaattgaaacagaaagcttcaaaatcattcaaggaatcattgatcaagaatttcctgactatattttctcatcaacgaaggaagaaaaaattattaaacgggtgattcatacaagcgccgattttgattatttgaaaaatctcgtcttttctaatgatgttatttcggagttagagaaatttttcttgggaggagatggcacaatttttacagatacaactatggcacttagcggtattaacaaacgtctcttagataaattaggtattcgttatgaatgctatattgccgatccagaagtggctgaacaagcaaaggcaaagggaatgactcgttcgatggcaggaatagagcgagcagcaacaatttctggcccaaaattatttgttattggaaatgcgccaacggcaatttttaaattactggagctacataaacaaggagaattaaatacggttgctgttattggtgctcctgttggttttgttggagctgcagaatcaaaagaagcattgtttgaaagtgatctcccagcaatcattgccaggggtcgcaaaggcggcagtaatgttgctgcggcgattatcaatgccatgttatatcaattgattgaaagggaaaactgatggaagagttcgttttctataatgggaaaaagctgcgaaaagggtatacaacaggttcctgcgcaactgcagctgcgaccgctgcggcagcatttctttttgaagaggaagccacagaggagatttgcattgaattacccgataaaaaaaatctaactattccaatcgcttcgattgaagctaccgaagatggtagccaagcttttgttgtaaaagatggcggtgatgatgtggatgcgacagatgggatgttaattggtgcaaaggtcgttaaaattgatggaaatcaaattctaattgatggtggaatcggcatcggtcgagtaacagaagtagggttacaaaatcctgtgggtcaggccgcaattaatcctgttccaagaaaaatgattgaagcttccgttcgcaaaatcatcggtctgaatcagggagtaaaggtgactatttttgctcctgaaggagaagtaatcgctaagcaaacaatgaatcgacgcttaggtatagtgggcggcatctccattttaggaacaaccggtattgttacacctatgtctgaggatggctggaagcagtccatctcattggaactagaaatgaagaaaagccaaggatattcttcagtcattttatgtccaggaaactatggtgaggagtttgttctaaatacaatgaagctcaatggcgagaatatcgtttcaatgagtaattttgtcggctatgtcttaaaagaagttcagcgcttggaatttgaaaaggttctgatggttgggcacttaggcaaattgattaaagtttctgcaggaattttttcaactcacagtaaagatgcagatgcacgaacggaaatcttgatcgcaaatctagccctactaggtatgcctgtaccccaattgcaagaaatcgaaagatgtttaacgactgaggctgctggagagattattgccagtgcaggatacgaagctgtctatcaagtgctggcagaaaaagttaagaaacgttccgaagatttattgaaatatcggaaacatgagccaaatattgaagccgttcttttttcttcacaacgaggatacttagcttctacaaaacctctggagcagctaaaggaggagtggcgatgatcactgttataggtatcggaccaggcgggacacaagactatttatttggaaaagctcaagcggctattcaggcagccgatttgattatcgggagtcagcgtcaattagagattattcctaaaaacaagaagcacaaaactcatttacttccccgtaaactagatgatctggaagattttttaaacgatcatcaaaaggatgagctagtaattttagcttccggtgatccattgacctatggcattggcaactggctcctaaaacgattttcaggagaaaatttactgattttgccggggattagttcccttcagtatttattcaatcgactaaatattccgatggaggattgttttatcactagtagtcatgggaaatctccgaacttttctcttattttcaagctgccaaaggtcgggatagtaacagacaaaagaacaggtccttatcaactggcacaagaagcactaaaactcggcaatgattcaattttttatataggtgaaaatctcagctactatgatgagaaaataaggcgttataaagcttctgaggttcccaatgaagactatcaaatgaatgcagtggtgataatcaatgaaagatagtagttttattcgcggtaatgttcccatgaccaaagaagaagtccgaacggtcagtatagcaaagctgcagttagctaaagcagataagtttttagatattggcacaggaacaggcagtattgcgatcgaagcggcattgctacatccaaatttagaagtgacaacaattgattcaaatcaaaccgctgtagctgttttgaagcaaaatctagcaaagtttcagttaacgaatatccacagtattcttggcaaggcaccgattgaattagaggataaatttgatgcaatttttgttggcggaacgggtggaaacatggctgaaatacttgcttggagcttccagctgctgaagcctgacggtcgtttagtattaaatttcattttattagaaaatgctcttcgtgcaatggaatggctggaaacgaatcatcactccttccagacgattcaaatgcacgttagtcagttcaccaaactagggcaagggcactattttaaaccacaaaacccagtaatcattattgagacgagaaaagaggattaagtatatgacaaaggttcattttgtcggtgcaggacctggtgatcctgaactgattacgtttaaaggctataagttgttaaaatcagcagatgttgttatttatgcaggctcacttgtgaaccctgaactgctaaattactgtaaaaaggaatgcaagatatttaatagtgcctcaatgaatctaaccgaaatcattgatgaaatggagcacggtgttcgagaaaataaggaagttattcgattacagacaggtgatttctctatctacggttcaattcgtgaacaaattgaagagctaaaaaaacgcaagatcgaatttacctgtacacctggtgttagctcctttttaggcgcagcctctagcttaggcgtggagtatactgttccagaaatttctcagagtgtgattattactcgtatggctggaagaactccggtaccagataaggaaagtctacgctcttttgcccaacatcaaacgtcaatggtcatttttctttctatacaaggtatcaagcaagtagtcgaagaattattagcaggaggttatcagcctacaacacccgtagcggttatttataaagctacttggcctgaagaaaagaaaatcattagtacattagaaaaaatcgcagaccaaatcgaagcagaggatattacaaagacagctttaatcatggttggggagtttttaggaaatgagttttactactccaaattgtatgatgcctcttttaaacatgaataccgtgatgtgaagcgtaatgaataaagcagcgattttagccttgacgtcaacaggtatccaattagccaaagaactccgaggtaaatgggatcaggaaatcccaatctttgtatcagaagacaatttggatgaagaagtactgccttttccgacagggaaatttagcacagggattcaggtattattcaagcaatatgacgcgcttatttgcatcatggccactggaatcgtagtacgcagtattgcaggagtattggaggacaaacgaaacgatccagcgattgttgtaatagacgaaaaaggccggcacacgatcagtcttttatccggtcatattggcggcggcaatcaactgacgctagaaatcgcagcgaaattaaacagctgtccggtgattaccactgcaacggatgtacaaaatgtgacggctcttgatttgttgagtaaagagctgaatggctggtatgcagatttcaaagagacaacgaagagagtcaatcgactcttagcagagcatcaagcagttggtttgatccagcggggaaattgggtgagggatcttcgaggactttctttgctcaaagaaggagattcatttaattcttatgaagcggtattgcttatttctgacaaaagagaagagctggagtctgaaaaaataatccaaattgtgccaagacggtatgtattagggattggggcaaaaaaaggaattgatttttcaatcatcaaagaagaataccttgctttttgtcaatcaataaatatccattttcgcagcattaagaaaatcgttagtatcgatattaagcaacaagaagctggaatctgccaattagctgaatggctggaaattccctttgaaacctattcagcagcagaattattaactgtttcagagaaatatccgcagtcagcttttgttaaaaaagtaacaggagtaggaagtgtttgtttggcagcggctgacttagccagtaatggaaaagtggtgactgagcgttacgccaataagggagtcacctttgcattgggaaaggatgaaaacgacacatgttatacgttgtgggattaggtccaggtgagaaggaaaagatgtcacttgaagcgattgaagttattaaaaaggtggaagtgattgttggttatacgacctatgttcgtttaatcaaagagctagttggtgaaaaagaaattgtcagtacaggaatgaaacaagaaattgatcgctgtaaaaaagcgattgaaatagctaaaacaggtaaggatgtcgctgtcatttctagtggcgatgcaggcgtctatgggatggcaggcctgatcttagaacttgtcagtcaaatggatgaagagcttgcagtcaaagtgattcctggaattactgccagtattgctggcgcggctttgttgggtgctccgctaatgaatgatttttgtcacattagcttaagtgacttaatgacaccatggacaatgatcgaaaaacgtcttcatgcagcagccagcgccgattttgtaatctgtctatataacccgcgaagcaaaggcagaccaaatcatttagctaaggcattagcaattattcaacaatataaatcaaaagatacgatcatcggattggctaaagatgtaggacgcaaaaaagaacaggcaatttttacttcaataggtgatattgatgaaactttagtagatatgacgacggttgtattagttggaaataaagaaacttatctatcggatggccgaatgattactcctcgaggttatcaattatgattctattacttggaggaacctctgatagtttaaaaattgcgcaggagttaaataaagcgaatttagctttttatttatctgttgtatcggattacggagagaatttggctacagcagtaacaagcaatgtggttaagggacgtctaagtacaagagaaatgattgaattcatgaagaaacatcaaatcactcaattgattgacgcgacacatccttatgcgatagaggtttcaaaaaacgccatgacggcttgtactcagcttggaactaattatcttcgatttgaacgtccttcactgattactgatgagatgatcacagttcaatcaataaaagctgcttgtgaacaggctttaaattattcaggaaagatctatttaaccactggaagtaagacgttagcagattttttagagtatctgcctaagaaacgaattgttgccagagtgttgccaacagttgaggtgttaaaagtagttgaaaagctggaaatatcaacagggaatgtcgaagcacttaaaggtcctttttcaaaggaactaaatcgcgagcttttgatccataatcaggctggggtaatgattactaaagaaagcggtcatgcgggtggttttttcgagaagactgaagcctgtagagagctaaatattccgtgtattgtcattcaacgcgagcaattagactatcctgaaaagttttcttctattgaaggactaattgagacaagtaaggaaaaccaattattaacgaaaaaagaggagcgatgaaatgactggatgtatcgccttaattggtgcaggactaggagatccagaattattgactgttaaaggattgagaaaaatcaaacatgcggatgtgatagtgtatgaccgtttgataaatccagcgattctgaattcctgcaaagcaacctgtgaaaaaatttacgtaggcaaaaagcccgattaccatcctgttccacaggaaaaaattgaagaaatcatgatcgaaaaggctgaacaagaccttgatgtagtccgactaaaaagcggtgatccctatgtttttggtcgtggtggagaagaaggagtggctttaaagcaagcgggaatcccatttgaagtgattccaggaattacttcttcaattggaggattagcttacgccggaattccaattactcatcgtgatttggcagcagactttcatgtttatactggtcatttaaataattctgagcgtgaaattgattgggagacagcggctaaggttggaggaactttagtttttctaatggggatgtctggtttaaagaaaatcaccgagcagctaatgcttcatgggaaggataagaatactccagcggcaatcattcaatgggcgagtcgtaaacaacaaaaaacagtagtcgggacattagaaacaatttttgaaaaagcctgtgtcgcgaaactacagccgcctagtttgattgtaatcggtgaggtggttacacgaaggagagaattaaacttctttgaagaacgacctttgtattcaatcagtattgccgttccattttcaaaaaagaaacgtatggtgagtcgtttaacagatttaggcgcggaaattatcgaactaccaccaagtagtattgtattttttgatacaattatcgatttttctgaacctcgacaagcagttttcactgatccactaagtgtagaaatgtttattcgagcaatgaaaacacaggaaattgactggcggaaattagccgactggtattttatttctgttggacatcacactggatcggttctggaaaaggccggaatacgacctgatatgaattatccagatttaacggaatgcctgcagcgattagaagaaaacacggacagcctattcttaggtgattctttaacgttagcagagctaaagaatcacgaatctcccgttgaaaagctgcttacacacgaggagaaaatcactgttgatattcctgatctttggcaaaaggccgatctgatgtattttccaaattctaaagcagcccgcctgttcctagctgcattaagtaaggaggagttggcaattgtcgcgcaaaagaaagtgattgttatggggcagaagacaaaagcggtctttgatagttatcagcttgctgtggttcagacggcggaacctacatttgatcaagtcgtagaaaaaataaaagaggagatgaagcgatgaagcctgcattaattgctgtcagttttgggacaagttatccagagacacgaaaaaaaacaattggggctgtagaggaaaagttagcagagaaatatcctgaattagatgttttccgtgcctttacttccaataaggtgatcaaaaagatcaaagagcaagaaaatgtaacggttttaacggtagaacaacagatgaaaaaactgattactgaagggtacaaagaaatctatattcaaccacttcacatcattcctggaattgaatattctaaagctctgcatcaagcaatgcgttataagaatcagctagagcttgtcaaagttgggaagccattacttagcagtattgaagattatcaaaaggtcgttgcttggctcaagactatggcagcggatctcgatgagaatgaggcgctagtattaatggggcacggcagtcagcattccgcttttacagtttacgcttgtcttgatcatatgcttttggaaaaaccaatctttatctgtgcggtggaaagctatccagaaatttctttattgattgaacgacttaaaaaaagccgatataaaaagatcaagctttacccattaatgttggtggctggtgatcatgcaacaaatgatatggcttctgatgaagaggattcttggaaatctcagttggaacaggctggttttactgttgaggcgcaccttagaggtatgggtgaatttcaggaaatacaacagcaattttgtgagcatgcagcagcaatgatggaaggatcgacaaatgactaaattttatggagttgggactggaccgggagcatcagatttattaacgattcgtggaaaagaagttttgcaaatggttgactgcctgtatacgccagaacctaaaaaagctggtaaaagtttagctttacaaattgttacgccttatttaaaggaagacctaatgattaaacaacgtcacttcccgatggtaaataattgggaggaaaaacgaaacgcttgggacaagattgctgaggaaatcatttcagatgtcaagagcgggttgaatgtagcattcataactttaggtgatcctatggtttatagtacctacagttatttgttagaacggatgacagaacaaatagaaacagagacagttccaggcatttcttctttttgccaaatttctaatgagttgcagattcctttggtaattgatgaagagagttatgccgttttacctgcgactgctgatgaagaaatactacgaatcgctttaaaaaatatttctacagttattttaatgaaggtttcgatagcactgcccaaaatagtaaagctcttaacggagctagatttattaggacaaacggtattggtcagtgattcttcaatgtcgtcagagaaaattatgattggactaaatgagttggatgaacaggattccctttcctatttcagtaccatgattgtttataaaaatagaacgttgaaaggaaggtaaaaagatgaaaataaaaacagttaaaaaaattctctttgtcgcgcttcttttaattctagttgtccctcaaaaggcacacgcgatgcacatcatggaaggtttcttgccacttggctggtgtttgttttggtatgcggcattcattccgttctttttctatggattattcagtatcagaaaagctgtggctgagaatccacaaaacaaagtactgttagcttttagcggggcgttcattttcatcttatcagcattgaaaatcccatcagttacgggctctacttcacatccaacgggtgttggaatcggaacagctctctttggacccggagtgatcagtgttttaggaaccatttgtttattattccaagccttattattagctcatggcggaataacgaccttaggagcaaatgccttttcgatggcagttgttggtccatttgttggttatggcgtttatgtgcttctgaaaaaagcgaatgtttcaacgtctgtttgtttgttcttgtgtgcgttcattgcagatttagcgacgtactttaccacctctgttcagcttggactagttttccccgatccttcatcaggtatttttggagcaatcatgaaatttgtaggtgtctttatgatgactcagattccaattgccattgccgaagggcttttgaccgtcgttgcttataatcttatttcagcgaatttttcttttcatgaaagaggggttttgaacaatggaaaaaaataaatcaaaaacgggtataaatattattctattattagcggtcgtagctttgatggtgggggcactactaatcaatcaacatgctgagtatggcggttcagatggggaagcagaaaacgtaatagcagagattaatccggattaccaaccttggtttaattcattattagaacctaaaagcggagagattgagagcctattatttactctgcaaggaagcttaggtgtaggaatcattacctatattttaggttactacaaaggaaaaaatagaaatgctgttaattgataagattgcttatgaaaaccggctacttgatctatctccaggaataaaaggttgtttgtatctttttctattgatcagttgttttctatcgccgccaatagttcaagttctaataagtctcattattggtggagtaactatctttgttacaaaagtgagagcaagcaggtatttcaaatggctgctggttccggcgccttttcttgtgattagtatcttaacaatcttgttttccgtcagctcacagtcaaaagattttatctttcagattccagtatttcatcattttctaggtatatctgaagcatcactttatttaggaacacgcttgttttttcggtcggctagttgtgtgatttgtacctattttttcattttaactgttcctttccaccaaattttattgattatgaaaaaagctcattttccagcgctattgattgaattaaccatgttaatgtatcgctttatttttattttcattgatgaacttctgattattaaacgtgcacaggatatgcgttttggattcaaaggattgaaaaacagctatcaatcattaggggtattgattaagcttctattttttcaaacctttgatcgcttcaataagatgattctttcgcttgaaatgaaattttttgatggtgattttccactatgattactaaatgaaagaaggtgctaccgtgtttaaggtaacagatttatgtatcagttacgaaaatcaagcagatgtcttgcatcatctttctttggattttagcgattatcgagcaatcggcgttttaggagcaaacggttcagggaaatcaaccttatttgcggcgatcgtaggacttttacgaccgagtcaaggcgaaatcatttatgataatcaaccgctgaattataaaaaagcggcgctgtataagtaccgacaggaagttggaattgtctttcaagaacctgaacatcagattttttactcgatcgtggaagatgacgtcgccttcgcactaaaaaatctggggattgaaccaacgcaaataaaagccagaatggacgaggtgttcgcattactgaagattgaacatttgaaaaagaaaccggttcaatacttgagttatggacaaaagaaaaaggttgcgattgccagcgttttaatgcttaaaacaaaatggctattattggatgaaccaactgcagggttagatccagccggcagacaacagatgattgagattatctctcgtctaatccaacaggggaccaaaattattctctctagtcatgatatggatctaatgtatgagatttgcgaatatctgtatgttcttgataaaggaataatcattaaagaaggagaagctgaccaagtatttttggatgataagcttcttgaggctgcaggattggagcagccgtggttggtgaaaattcatcagcaattaggttttccgctagtaaaaaatcagcaagaacttatgcaagttaaaatgagagcgaggtgaagaagatgggaaaaagcttgatgattcaggggactgcttcggattcaggtaaaagtattttggtggcagccttgtgccgtatttttcatcaagacggaatgaaggtaatgccctttaagtcgcaaaacatggcattgaattcttatatcacattagatggcaaagagatggggagagcacaggttttccaagcagaggctgccgggattgaaccagatgcacgaatgaacccggttttattaaaacctacttctgatcgcaaatcgcaagtgatttttaatgggaaagtcctttgcgatatggatgctgtggaataccataattttaaacctcagctgatagaaaaaatatctgatttatatcaggagttgctagaagaaaatgacgtgattgtcctggaaggtgcaggtagcccagcagagatcaatttaaatagtcgtgatattgcaaatatgggaatggcaaaaattgccgatgctccggtccttttagtagcggatattgataagggcggtgtttttgcttcgatctatggcacgattcatttattagagcctgaagaacgcaaccgaattaaaggaattatcattaataaatttcgcggcgatatcgccttgttagaaccagggttaaaaatgattgaagaattgaccgatgttccggtggttggggtcatcccgtatgcacaattaaatattgaagatgaagatagtgtggctttatcacaggtgagccgaatgtataatacgcagaaagagttagacattgctgtaataggactagctaaaatgtccaattttactgattttaagagtttagaaagtgagccagatgtgtcagttcggtatgtttttcctaatgatcaactaggaagtccggatattcttattttacctggaagtaaaaatactttagaagactgtctctacttgcagcaatctggattagcgaaagagattgaacgaataagagccgaaggaaaaatgatttttggaatctgtggtggctatcaattacttggaaaaaaactgcatgatcctcatcacgtagaatctactattggcagtattgatggatttggtctattgaacacagaaaccttttttgaagcagaaaaaacgactacgagggtagaagcaataattgatgatgagacgattaacggttacgaaattcacatgggtagatctgaaaattacgagcaacagtattttgctcaagttatttctgctaatggacaaacagttttgaagaaagatggagcaattagttcagataaaaaggtgatcggaacgtatcttcacggtgtttttgataatagtgtttggcgaagaaaactgttaaatcaggttcgagctgaaaaagggttagccccgattgacaaaattgcgttgccttatcatgagtataaaaatcagcagtatgataagctggctaatttagttcgtgaaaatgtcgatttggagaaaatttatcaaattatgaatcagggggtaagtgtatgaatatctatacgcgttacggagatcgtggttttactagattggttgggggaggaagagcaaaaaaaaatgctccccgtgtccaagcgtatggatcgattgacacattaaacgctcaggttggactcaccgtagcttctttagctcaaaaagattcactgtatgaagaattagttcagattcaacagtgggtatttgattgtggcagtgactttgcaacccctgaggagaaacgcccctataaggttcaatctcaggtcattgtttggttggaagaaaaaattgatttttattggcaggaatccccaaaaattgatcggtttgtattaccaggcgggacggtcacggccgcaaatctacatctttgtcgttgttttgccagagaggctgaacgaaatgcagtagctctcttggaatacaatgaagcaattaacgaagaggcgttaaagtttttaaatcgcttatctgactacttttttgctttggctcgttgggttaatggtcaagctaagcaaaccgaaatcttatatgagaatagcgctcctgtttttgataggaagaagtgagtctgaaaaagggtttattgagtgaaagaaggaagaaaatgaaaaagcttagagttggcacacgaggtagtaaattagccacgacgcaaacaaaacaaacattagctgtttttcaagagcattttccagaggttgaagtagagttagtaaaaatcaaaaccaaaggagaccacttagctacacataacttgcaagcaatcggtgggcagggctgttttgtaagagaattagaataccagcttcgtgaaggtgagattgattttgcgattcacagcttaaaggatatcccaaccacgattcacgaagaattagccttggcctgtataatgaagcgtcattcaccaacagatgctctgattattcgagaagctgggaaaaccttagagactttacccaaaaatgctgttgttggaactagcagtcttcgcagaaaggctcatctgctgcatgtgcgtccggattttgatatccagccgattcgaggaaatatcgatacacggatacgtaaaatgaatgaaggtcagtacgatgcgattgttttagcactagccggcttagaacgtctaggactggatcaaacagtttatcatcaagaactatctccagagatcatgcttccggcaatcggacaaggtgcgattgctttggaatgtcgtaaagataatactgaaattcttcaaatgctcaaaaaaatggaacatttagaaacagcaatagcagtaactgcagaacgtgcttttttaaacagtatggatggaagctgtacttttcctgttggagcgtactgtcggcaaaaaaatggttcttatgaattaacagggatgattgggagcgaaaatgggaaaatcattctgaaagaaacgctgcagggagatgatccggtgattttaggaagagctgttgccgataatctgatcaagcaaggcgcaattacattgattgaggagtgtaagaacgatcaaaaagaaacttttatacactagagaagcaagtatgccgattgatattcaacacgtgtttgcagaaaaaggcgtggaggttattactattccgatgaatcgcacggttttccagccacataaaagcctggagcatgagtatgattggatttttttcactagtgtcaatgccgtaaaatattttgattttacacaattgaatcagcaggccaaaatacttgcaattggcaatcaaacgaccaaaacgttgcaagagctggggtactctgttgattttcaaccgaaagaaggcttttctgagggattagtagaggaatggcttcgcctagtcggagcgaaacagcgtgttttttggccccattcatttcaagcccggcgtgtgatatataatgctttagctagacaaggacatgtagttttagagcaggtcatttacagaaatgaatttttcccagaagatcaagcacggttgcaaaagctgataatgaatgaaactattgattatgtattgtttgctagtccttcagcctggacttcttttagtaaaacaattagaacgtttaagcagttgcccgaaaatttttggtcgcagttaacgattgccgctatcggccccgttacagctagagtgatagaaaaagaacagcatgtggctatccaaccagatatttatgatatgccgcatttgtatgaatgcttattgagaagaattgaccaagagaatgtcagttctctgtaataattacaccacttttgagttgaatttttatgagaggaattagctgattaacagacacttttgattaagctaattttttcttcaaagaataaggagtgatcggcctgtgagtttgataaaagaataccgagatctttccattttacctatttcgaagggaaaatcgctggtgatcgcttgtgattctagtgcgggtattgggaaaaaggaacacgatgccgttgaaattgatcccgcaataacagccgctttttgtttgcgtgttcccctaatggaattattatgttatggagcagaaccgattgctgtgattgatttgatcggtaatgaatatgctcctactggagaacgaatgttaaaagggataagggaagaattggctagagctgaactttctaatatcaccctcaatggcagtacagaggaaaacatgtttactaaaactactagtgttggaatcacagttgtggcggaaactaaggcgggaaaagaaaattttcagatgcagcaagcctgcagtctcctgcaattaggacagccttatgttggggaacaggttgtgaaaaatcgggaaacaattttttcctatcctttggtaaaggccctaagatcagagcctggagttatagatatgttgcccgttggttcgaaaggtattcgttatgaagcagaattaatggcgaaggactctgagttccagattcatttttcagaggtagaaaatctagattgttcagcgggaccggcaacagttattctaatagcagttaaatcagaacaagaagccgatattacatctcgttattccgagttgaaaaaaatcggtgaatataaaaagaggtgacaaagtttgggagaaattacattagttactggcggagcacgcagcggcaaatcagcttttgcagagagcttattggatacagaggcaaaaattaattatattgcaacgaattgctcggctcaagatcctgaaatggctaaccgaatatctctccatcaacagcgacgtcctaaaaattggcaaaccaccgaaacgtacttagttgtctccgacgtaatcgaacaagcacaagtgtcagcgcatttattggattgcgcgactatgctatcgactaattatttttttgacttaatgaaagaacgatttggtgaggacttcacaataattgacgaagaaatccttaagctaactcaaaaagagaaggctgcaattgaagccgatattctcaatgaatggcaaaaaattcttacagcagcgcggaatagtcagacggatttggttgtcgtgacaaatgaggtgggactaggaatcgttcccgaaaatgctttttcccgttggtttagagatgtattaggtcatgtaaaccaatctttaggaaaggaagcggatgcggtatttttcgtgatcgccggtatccctatgaagataaaatgattgatagtctaattttgtattttcaattctttacgcgaataccgattccgattgcggttgatgaacctgaagaaaaaatgcgttcaggcgttcgttttttttcgctgtttggattaatgattggctttttagaggctgttgtttattggcctttacaatatttattcagtcccagtatcgcttgggttatgatattgtttcttgatgtgatgttgactggtggctttcatttagatgcattatcggatatggctgacggcctgttttcttctcgtgacaaagatcgtatgctggaaatcatgaaggacagccgcgttggtagtaatggcgttttggctatcgtcttttattatctacttttagtttttagctttttagtgttgctccccaatctcaatattcaattgcagacgacaattgttttattattgaatcttatagggaaaaatggcatcagtcttttgttttatcagatgcagtattctggtaataattctcaaggattaggtactacctttttgaatgtaaaaaagcaaaatatcttaatttgtcaattgttttctttttttgtgttgttcatttttttaggtagagtagggattgtatgctttattgtcaatcttttaattgtttggctttatcgcaaattagttatgaacaaggttaatggtcttaatggcgatactttaggcgcctgttcgcctatctcacaagtagtatttttattgactttaattctaatgcgaggttttttatgaaaatcattttgattcgtcatggagaaacagaatataatagaagacacttattttatggaaagacggatatctccttgaacgacaccggggttcaacaggcttatttgttgaatgaaaaattagctggaatgagacttgaggtacccatttatacgagtagtttgaaacgaacgatcgaaacagcagaattgatctttccagaccaaaaaaaaatttccttaaacgaactagatgaaaaagattttggtttgtgggaagggttaagtgcggatcaaatcaacgaaagatttccagaagaatgggaaaaatggttgatttctccctttgaggtaactccagcaaatgcggaaaaattttcggattttcagcaacgtgtcttagcttgtttggaagtgatgcttcaaaaaaagcaagattttgtaattgttggacatctcggcgtactacgagtcattttgaaagactggtttccggaatatgaattttgggaaatcgcattggatcaaggaaactatacgctgattgaagttggagagtcaacaacgaaggtgattgagtggaataagtaactgttattcttataaatagaatgagctgttttcttagctattaatttgactaaaataactacgtgacgattgaccgtgtatcatattacggtttttttgtcgttgctctttcatttgaagatcattaataaattgtaataaaaagagtttataaaaaaatcataaaaagttgatgctagtgatgaagacgaatagttttagtataaactgaacaggtagtttagagaatttatttttatattttatgaatcaatcagcaggcttgataattataatttttttatttttaaagtgaggatttcgaatgaaagtttttaagcgcttgatcttaattattttaggagtactattagtttttgaatgttacttaattttttcatttttacagggttatgaatcgacaaaaaatgctcaatcgaagcaaacgatcccttttaacggagaagaagctccagatcagaatgatttgaacattttgattattggtaccgattctcggggagaagatcgaggtcgatcagattccctaatggttgctcattatgatcagaaaagaaaacaacccaagttaatttcaattatgcgcgatagctatgttgatattcctggttatgggaaggataaaatcaatgcggcgtattcatatggtggcattgagctggtccgaaaaacattaaaagaaaactttgatctcccaattgaatattatgtaacaatcaatttcgaccattttaaagaagctattgataatttgtttccaaaaggtgtgaccattgatgcggaaaaggatctagatttagatcaagtatttattaaagcgggtaaacaaaaaatggacggcaatacattgttgcagtattctcgattccgtgaagatgaggagggcgattttggtcgaattcgcagacaacagcaggtgctctcagccatctcacagcaagtcacaaatgttacttcattaagtaaattgccaaaaacaactggaaagctattgggatatgtcgatacaaatttatctgaaagtacgattttaagcgtaggaaaagatttcgctttaggcgatactaaaaaaattgaaacccttgctgtaccaatcgataaaacttgggaatttaataatgatacgccaagtggaagtgttttagaactagatactgaagcaaatgcaaaagcaattcaaacgtttttaacagaatagtcgaataaaacgtactatttttaagccaatgggatactcgttggctttttcttgtgtcctgccaaaatcgaataatcattaatttttttagacaaatcgatcaatttgtttattaacaaatttgtatgattttagctataatccctgtcgaggggatgaaataactaatgaaaaaattagctttgatcgtattatgtagtggtttttctacgagtttttttgggttcaacacagacgccttcgcaagtgttgctaattcagaagttaaggtaacgaaagcatcagaaacttccgatagtacaaccgcttctaatgaactaacaaatagacagacagaaatagaggctgctttcaaattggctcagcaacaatttgaaacgcgtcaaaaacagattgcacaagatattgctgaggctcagaagtattcacagaaacggcatgaggatctgcataatgattttgctgtgattcaagatcaattagatcagacgcacaatgattttcaaaaccattttaatgaggtgaataatcgcattcaaacagatcactccacaattgaagatcaatgggcacagacgcaaaagcaattagaccaagtgcgagcggatttaaaacaaaagattgctgaagctgaaaaattgcaagaacaattaaagtcagatcgctcaacgctcgatcaaagcatttcaaaggccaaaagcagcgcgcagagagtgaagggtcagtttactgaaggagcagaaaatgcagaggcagctgtttcagatgttcaaaatcgcacaggcgatatcgaaggcagtatcaatcgaatcaaggctgtcctcgattcagcgggggatgacctttcggcagatggaaaagagggagaaaaaacgcccacgaccctgtctgcaacgtcaaaaaagactgatgatcagcaacaaaataaacaagtaaaggaataccctaaaacaaatgatcaagcgaatccttcactttcgctaatcggctttgggattattgggagtatctttttttactacacacgcaaatattacaaataaaagaggctagatgacctgaaatagattattcaggatcatcgagtctttttttgaatgtaaaaattacattaggaatgctcggtaaaagcaagtgtttgtttttagcagagagatgtatgttagaatacgtctgttactactacttagaaagaggaacgagatgacaaaatctacttcagcctatattcagatcccgttttgtgaacatatttgttactactgcgacttcaacaaagtttttcttgaaggtcagcctgtagatgaatatatcgaagcgttgttgaaagaggcacgcttagctttaagacaaaacccagtcgaaaaaatggaaacactttatgttggagggggcaccccaacgtcattgactgcaagtcagttagaacgtttattgagtggattgcgagaaatccttccttattataatggagaatttacagtcgaagcgaatcctggcgatttaactgctgataaattggatgtaatgaaaaactatggagtcaatcgcttatcaatgggtgttcaaacatttgatgatcgtttgctgaaaaaaattggtcgtaagcataccgcacaggatgtgtatgatacgatccaattgctagaagaaaaagattttagcaatgtaacgatcgatttaatttatgcattgccgggtcagtccctagaaagttttcgtgatacggtaacacgagccttggctttagatttacctcattacgcactatattcattgattttagaaaatcaaacgatgtttatgaattgggttagacgtgggaagatgcatcttcctgagcaagaattagaagcacagatgtatgccgaaacgatcgatgcgatggaaaaagctgggcgtaaacaatatgagatcagtaattttgcaaaacctgggttcgaaagtcaacataacctagtttattggaacaatcaaaattattttggtctcggagcaggtgctagcgggtaccttggaaatcgacgctataaaaatcgaggacctatccagcattacttaaagtcattgaaaaatgatcagctccccgtgttagaggaagaaatccttactcaaaaagctcagattgaagaggaaatgtttctgggcttaagaaaaattttaggtgttgataaaaccgtttttgaaaatcgttttggcttcagtatgatggatgtgtatggggatgtgattgaaaaattaaaacagcaaaagctgataacagagacggattcgagggtttgtttgactgaggagggactatttcgcgggaatgatgtttttgaagaatttttactgagtaacgccaattagcactctcgtgtgtagagtgctaattttttatattttttccttgacttatatagaagttgttggtatattaataatcgagttagcacttaaaaagaaagagtgctaactaaaggatgagaagaatgttaacggaaagacaaaaactgattctcagcttaatcatcaaaaactttaccaatacgggtcaaccggtcggatcaaaaagtttgatggaagaaggcgtaaaagcaagctccgcaactatccgcaatgatatgaaggcgctagaggaattaggcatgttagagaagactcattcttcatctggaagaattccttcagctttaggctatcgatattatgtggattatctattaacgccagcgaaggtgagtaatcaagaagtagaccagattcgcagatcgcttaagaaagatattcatgagattgatgatatcattcagcagtctgccaagatactttcacaagttactagctataccgcgttctcacttggccctgaaatgaaggatcggacattgactggttttcgaattgttccattaaatgatcgtcagattttggcgatcatcgtcacagataaaggaaatgttgagagtcaagtttttcgcattcctgagaatgtagacagtcaggacttggagaaaatggttcgaattatcaacgatcgtttagtaggccaacctttggtaagtgtttatcaaaaattgagaactgagattccaatgattttgcatcgttacttccagacaactgaaggaatcagtcacttatttgacgtgattttgaatgatgcttttgaggataaggtgtttgtcagcggacgaatgaatattttgaattttaatcctgatcaagattttaatcatgtgaaatcaatgtattcattgatgcagaattcagatgagctgacacagctactgttgccttatgatagcgatattcatgttcggattggcgcggagatgggaaatgatctgtttgatcatcttagtatgattcaagcaaactatgaaattcgtggacatggccgcggaacaattgcgttattaggaccaacatcgatgccatattcaaagatttttggtctattggaagttttccgatacgagttgacgaacgcattggacgattattatcgttctttgggtttatatcactagaaacgattcctacaaagaaagggagtacgcgcagtggcagaagaaaagaaacaagaagttgaagaagaattagaagaagtcgaatcagttgaaaatgagtcgaccgaaaaagaagcggaagatattgatattccagaagtttcagaagttgaagaactaacgaataagtttaacgaaatggaagacaaatttttacgagctcgcgctgagatcgcaaatatgtctaaccgcaacaaaaatgaacgtgaacaactggttcgttaccgttcacaagatcttggcaaaaaattactgccagcgatcgacaatttagaaagagccctagcaactgaagttactgacgatcaaggcgctagtctaaaaaaaggggtagaaatggtccttgaaagcttgactgttgcattaaaagaagaaggtatcacagagatcaaagcagaaggtgaaacgtttgacccaaatctgcatcaagcagtacaaactgttccagcagaagatgacgtaaaacctgacactattgtaaatgtgctgcaaaaagggtatcagctacatgatcgcgtattgcgaccagcaatggtgattgtagctcaataaaatgtaaactactatattaaacatataatggaaaaggagattttcaactatgagtaaaattatcggtattgacttaggtacaacaaactctgctgtcgctgtcttagagggcggagaagctaaaatcattactaatccagaaggaaatcgtacaacaccatccgttgtctcatttaaaaacggtgagattcaagttggtgaagtagcaaaacgtcaagcagtgacaaatccacacacaatttcatctattaaacgtcatatgggtgaagctggttataaagtagaagcagacggcaaatcatatacaccacaagaaatctctgcaatggtattacaatacattaaaggttttgcagaagattacttaggtgaaaaagttgaaaaagcagtcatcacagttcctgcttacttcaatgactcacaacgtcaagcaacaaaagacgctggtaaaattgctggtttagaagttgaacgtatcgttaacgaaccaactgcagcagcattagcatatggtttagataaaactgataaagatgaaaaaatcttagtatttgaccttggtggtggtactttcgacgtttcaatccttgaactaggagatggcgtattcgatgtattatctactgctggtgataacagtcttggtggggatgactttgataacaagatcatcgactacttagttgctgactttaaacaagcaaacggaattgatctttctaaagataaaatggcaatgcaacgtttgaaagatgctgctgaaaaagctaaaaaagacttatcaggtgttagctcaactcaaatcagcttaccatttatcacagctggtgacgctggtccattgcacttagaaacaactctttctcgtgcgaaatttgacgaaatcactgctgatttagtggaacgtacaaaagctccagttcgtcaagcattgaaggatgctggattgtcacaatctgacgttgatgaagttattttagtcggtggttctactcgtatccctgcggttgttgaagcggtacgcaaagaaactggcaaagaaccaaacaaatcagtgaacccggatgaagtagtagcgatgggtgctgcgatccaaggtggggttatcactggtgatgtgaaggatgtcgtattactagacgtaacaccattatcattaggtattgaaacaatgggcggtgtgttcacgaaattaatcgaccgcaatacaacgatcccaacaagcaagtcacaagtattctcaacggctgctgacaaccaacctgctgtagatattcatgtgttgcaaggtgaacgtccaatggctgcggataacaaaactttaggtcgtttccaattaactgatattccagcagcaccacgtggaattcctcaaatcgaagttacgttcgatattgataaaaatggtatcgtaaatgtttctgcgaaagatttaggaactcaaaaagaacaaaaaatcacaatcaaatcttcatctggtttgtcagacgaagaaattgaacgtatggtgaaagatgctgaagcgaatgcagatgccgacaaagctcgtaaagaagaagtagatctacgtaacgatgtcgatgctttattattctcagtagataaaaccttgaaagaattagaaggtaaagtagacgctgatgaagtcaagaaagcggaagatgcacgtgatgaattgaaagcggcagttgaagcaaatgatatcgaagaaatgaaaatgaaacgcgatgcgttgaacgaaatcgtacaaaacttaacggttaaactttacgaacaagcagcacaacaacaagcagaggctgatccaaacgcagctcaaggcggcgcggatgatgtcgtggatgctgattttgaagaagttaacgatgacgacaaataattgattcgttactaaaggccaaagtcatcgctttggccttttttctttcaagattggtgattcctttagaaaaaatctaagaaaagtatcgtatcgattttgagtgtgatacaatactaacgattctatgaaattatggagggaagccaatggctacaaaacgggattattacgaagtccttggggtacaaaaaggtgcttcggatgatgaaataaaaaaggcatatcgtaagctttccaagcaataccatccggatattaataaagaagctgatgctgaagaaaagtttaaagaaatttctgaagcctatgaaatcctaagtgatccacaaaaacgagctgcttatgatcaatatggtcatgcagggactgatccaaactttggtgccggcggagcaggcggtttcggaggcgctggtggatttggtggagcaggcggatttggttttgaagatatttttgaatcattcttcggaggcggaggttctcgtcaagccgatcctaaagcaccaagacaaggctctgacttgcaatattcgattaacttggaatttgaagaagctatttttggtgtggaaaaggacattaaatacaatcgtgaagaaacctgtcatacatgtaacggtaatggtgcaaaacctgggacacaacccgaagtctgtcataaatgtcatggctctggctcaatcaatgtggaacaccaaacaccacttggccgtgtaatgagtcgtcaaacatgtgatgtttgtcatggaactgggaaagaaattaaggatccttgtccgacttgtcatggctcaggtcatgaaaaacgtcctcatacagttaaggtaaaagtacctgctggtgttgaagatggacaacaaatgcgattagctgatcaaggcgaagccgggatcaatggcggaccatatggagatttatatgtggtctttaaagtgaaacaaagtgatatttttgatcgtgatggtgcagaaatctattacacgttgcctctaagttttgttcaggcggcgctaggtgatgagattaacattccaactgttcatggtgatgtaaaattgaagataccagctggaacacaaacaggtgctaagtttaggcttcgcggcaaaggagcgcctagacttcgtggcaacacaaatggcgatcagcaagtaacagtaaaaatcgtcacgcctaagaacttgaatgagaaacaacgtgaagcgttgcgagcatttgcagaagctggcggccaaacggttagtgaacaaaaagaggaaggtttctttggtaaggtgaaggatgcctttggcggaaagaaataattggctcttcgtcaaatcgtgttggtgaagacaaatttgaataaaacttagtccgatatgcgacgcgttctgtgcgccgcatattttttagttttcaaagatcagaccttgttgtaaatagatccgtgcccgaaagttataaaagttgcgataaccaaacgcaattcgtttaatcagcttgatcttgttattcagcccctccgtgacgccgtttgagtgggacaccttaaaggcatttgaaatacccgattggtagcgatggaagatcgtgaatttctttttaaacgactgaggtaacgtagatgaaattgttttaagggtttcttgaaagccttccgtatctcgtttaacgaaataatagcgtaataattgacaaaaatgatacgctgttcgcaattcttcgttgtagcttaacagttcatcgacgatttctgtttgactaattggtcgtttaaacagtcgatgataatgccgtttgagtggctccaatgtcgtggaatctttgagtaagagtttccaatatcgcttgagccgacggtacttcttctgattttcagagtgtgaggttcgaaaacgattcatgatctggacacgtaattgattgaagctgcgattgatgtgttggacaatatgaaagcggtcagttacgatctccgcatttggaaagaccgttttaagcaactgacaatagctggcattcatgtccatcactaggtacttgacctttaaacgggcctttctaggaaagcgcaggaagtattgagttagtttgtaaagtctgcgatcttcaaggatcgtaaatagctgattggttgtcccatcaacacaaataaaactcatggaaccagaaacagacttcattgatttgaactcatccatacacaacaccgtcggaaggaagttcatacgtggctggtaatgcttcgttgcttcacgcaagatccgtgtcaccgtcccatccgagacgaagtacttcttagcgattagtttacgtgattgattttcgtacagttccatgagaatcgcctgcttcagttcctttgttagttgatgatgttcatcaactaagtccgttttcgcagaaaaggtccgtccacaatcatggcagagaaaacgggtacgttttaattctaaaatagttaacttttctttgactttcaacatctgagtgcgtgtcgtataggaaccgttgcggataatacgaaccgatcgacagtgttcacaacaggaaggagagtcatccaattttcctttaataaactgcgcttgaacgcctttatattctttttcaatcagccattcttcatcaaaaaataaatgtttatctgttaatccgagtaattttctagtatgattatccattgagagactcctttggtagggtgacgttttggtcaactaaattttaccaaaagtgagtctctttttgagttgaaacgaagaaaaaagtgttagtagaaaatcgccttcgattttcaaccaacacaaaatattatagaaccaaataattatagagacttaatcaattcactgttgattgagtctcttttttcttttactattagtaagaagagaatatgtgttgaaggaggttcatatggataaattggacaagctatttgatcgaatgaccagagacatgatgcattactttattgcgggaggactcgcagaaccggatggcctaattcgcacaattgaattctttttaagctttgttgacaaagggaaactgagtagtaagctgttggataaacaaattgtagaggatgcattgattcatcatatgcctaaacatatgcctctatttattgatgaaagcttttatgcctatcaaatcctattagacctttatagtgcgttgtatcatgaaaaaattatcacagaggatgagtgcaaggatatgcactatttcatttatcttaataaaacggcctttttgactcgtatgagtaatccgaattattggtctaaagcaaaattagctattatggatgagtggcgtgaaggaaattttgaagttgaagacccctataatgttgaatactatgaccttgaagaagtaccaagaaaaaaagcacctgacaatattttagcgtttcctaaacagaagaaagttaaaaaccaaataacaagttatttagttagagtggacttgaaggggtttaaaccacctatttggcgtcgcttaaagattccggctggcactacttatcagcaacttcatcaaattcttcaagttagttttgggtgggaagacagtcatttacatagtttctttgtagatcggactaaaatgattggaccgagcgaactggaaatgtcacagttttctgaagagcgacgattgattgacgaggattttcaagaaggtgcaaaaattgaatatatctatgattttgggtgtgattgggaacatcaaatcatggttgaaaaggttcttgtgaatgaagctgtgcaatttcagtatgctgtttgtgtaaaagcgaaaggggatacaccgtttgaagattctcgcggagaagaaatttggaagccctttgatctagcagaaataaacgccaggctagaacagaaaagaatcaggaaatgagtaaaatcaaaattaaaaagagtctggagtaatttaggctctaagtcaaatcgtgttgttttcattaaatcactgaaaggaaatgcttcggcgtttccttttttctttttgtttttttgctcaaataatgtcgcaaagattctgttgaatcagaattcgcatacgaaggtggcgaaaggttctaaaaccgaatgccactctcttaatcactttaatcaagttattcttcccttcaagttttccgttcgaataggggtattttaacgcattgataatcgcttgtttgtgtttgtttaagtaaagaatcgcttttttaaatgctggatcaagcatcggaggtaagtgatcaatgcgttcgtaaaagtctgtataatctttggcatcaaaggcatccaacaaattttgatacacatcatagcttgtccgtaagtgctcgtcaatcaataataaatagtccaatacttccgattccgtcaggtatttccgttggaaaagcgggtattgtttgagcgaagaataattgatttttctatttttcttcagaatggttcgccaatatttcttaagcttgcgatactttttcatggcttgcgggtcgctctttttcaagtgattcatggtttttatccgttgtttgttaaacgcacgattgagttgttggattacatggaaccgatcaatagagatccgagcatttgggaaaacgacctttgtcacagaatcatagcccgcattcatatccatcacgacatgagaaacgtgtttccgtgcgtgataagtaaagcgcatgaaataggcgatcagcttgaagcttcttcgatcctctaaaatatcaaagattttccccgtatccgcgtcactgagaataaaacacatggcgccctgacagtccttagttcctttgaattcatcaatcaagagatgtttgggtaagtaattgggcttcagtcgtggttcttcaaaaaaagaatccaagacccgttcgaccgttttagcggaaaccaagtaacgttgagcgatatctttcatcgaaattttcttctttaaatcaacagcgatcgcaaacttgagcgcttgggagagataacagttttctgcgacataataggttttagctgaaaaggtatggtgacactgtttacaataaaaccgttgtttatagagatgaagataggtagacacctcttgataagggagtaattgaatccagctatctttgtagccatgatggatgacggagtcgtagccgcaacactcacaccgaggagacggatagctcagtcgaccagtaaagacggtggccattctgtcatggactttttcttttgaaacggcgtctttaggaaaagtaatgttggaatcatgaatatttaggatttgtttgatggttttgtctaggcaattatctttatatttgatattcttaatactggacatttggttcgcctcctatgattgggttcagcgatttaattataggacaaccaaatgtctttttgtataaaaaaatacttggtgttctcactcagaaagagtaacaacaccaaatattatagaaccgtaatttactccagactcttttgacgttttttggttctataatattttgtgttggtggaaaatcgaaggcgattttctactaacacttttttcttcgtttcaactcaaaaagagactcacttttggtaaaatttagtcgaccaaaacgtcaccctaccaaaggagtctctcaatggataatcatactagaaaattactcggattaacagataaacatttattttttgatgaagaatggctgattgaaaaagaatataaaggcgttcaagcgcagtttattaaaggaaaattggatgactctccttcctgttgtgaacactgtcgatcggttcgtattatccgcaacggttcctatacgacacgcactcagatgttgaaagtcaaagaaaagttaactattttagaattaaaacgtacccgttttctctgccatgattgtggacggaccttttctgcgaaaacggacttagttgatgaacatcatcaactaacaaaggaactgaagcaggcgattctcatggaactgtacgaaaatcaatcacgtaaactaatcgctaagaagtacttcgtctcggatgggacggtgacacggatcttgcgtgaagcaacgaagcattaccagccacgtatgaacttccttccgacggtgttgtgtatggatgagttcaaatcaatgaagtctgtttctggttccatgagttttatttgtgttgatgggacaaccaatcagctatttacgatccttgaagatcgcagactttacaaactaactcaatacttcctgcgctttcctagaaaggcccgtttaaaggtcaagtacctagtgatggacatgaatgccagctattgtcagttgcttaaaacggtctttccaaatgcggagatcgtaactgaccgctttcatattgtccaacacatcaatcgcagcttcaatcaattacgtgtccagatcatgaatcgttttcgaacctcacactctgaaaatcagaagaagtaccgtcggctcaagcgatattggaaactcttactcaaagattccacgacattggagccactcaaacggcattatcatcgactgtttaaacgaccaattagtcaaacagaaatcgtcgatgaactgttaagctacaacgaagaattgcgaacagcgtatcatttttgtcaattattacgctattatttcgttaaacgagatacggaaggctttcaagaaacccttaaaacaatttcatctacgttacctcagtcgtttaaaaagaaattcacgatcttccatcgctaccaatcgggcatttcaaatgcctttaaagtgtcccactcaaacggtgtcacggaggggctgaataacaagatcaagctgattaaacgaattgcgtttggttatcgcaacttttataactttcgggcacggatctatttacaacaaggtctgatctttgaaaactaaaaaaatatgcggcgcacagaacgcgccgcatatcggactaagttttattcaaatttgtcttcaccaacacgatttgacgaagagcccgttttttaaaagcgaatatttatttacaaaataatcactaatatgaaaacaactaatctctaaagatgaatcgacggaatccatgatactttttttcagcttgaactggagcgttatctgtaatcaaaagggcgatcatgacataaccaatccaactatcacgggaatagagtacgtatttaggtagccattcattggcatatttatctttgtattcctttagcccaccaaaggaataaaagcgggaaccgaaattataaactaaataggcaattcgttcctgggtgaagcttttgcgggaggttccaacatttgctaacggtgccatgcctaggtcgaagtattcaatgcccatttcatctcgcatatattggaacaggttgatgaaaagaaagtccatcgtaccgcttggtgcctcttctggactgtggcgcatcaagtcgatcgtgccgatgctgttggtataagtaggcatgaaatttgcgaaagcaacaatcttttcatcgctatttctaatcaccgcgattggcgctcgttgcaaataatcttctgagaaaaaacctaaggaaaagcctttttctttgcgacctcccaaccattcatctgagacagtttttaaagcataaatggtttcagacgagaagggtggtgtgatcacgtcaaattgatacccttccttaagaaccttgttgaagctagagcgctgacctttcattttctttccgcttaacgtaaagtcaggcaggtgaacatgggctctttcaccgaatttgataaaatcatagccgaactcgtgaagaatcatgaccatctcttcgctattttcataaaaaaccggtaaataattgtagcgatcaacttcattaatcagtgcttctgtagcagcctcgaagtcacttgctttccccgaaggatcgcccattactaaaattttattattgaaggtcgataattggaagaaaactgtgtcttcatcaccgttgttgtagtaaaagacctttttatcctttaaaaaaaccaattgactgtcaggattaccgccatatgttgataaaatgtgttggatacgagactcatctaaggcttctccaatttgaattcgtttatttttcaaaaagcggattaataataggataatgaaagcaactatcaggatagcgataaaaccaacgaaccaaattctttcgcttggaaacaagaaaaattctggcaaacgatgacgatgatgaatgtttggactattgtaaacaccgataataatgtatagaattgctaaactgcccataattatcccatcaatcgtcatccattcagcagaataaactagttgttctctaaataactcattctttgaaaaaataacaaaaagcaacaatagcgcaaggaatattccggttgagaaacgaaatcctgctaacaatgagtatagaaaagttaaggttacaatgatgatcgtaggaatataagctctcttcactcgtgcagaggttccacgaccggaaacaatcaataaaaagcctaaaagaatagctggaaagactacaattacacgggaatgaataggattcagacgttgcaagaaaggcaaccggataaatgcttcaggaattgttgctgataaaaccagcataattcccgtaaaataaagtagaataacctcgaacttgtgtgccaattcttttaatagactaattggaattcctttataacgtgcattaatcgttgtaccaagattcttgaagaagaaaatcaggccgatagcaaagggaatcaggtaatagaaaagtcgaaataataaaagccacgcgacaactgtttcgcgaggagttcccagagctgaaagaccgataatcatcatcagatcaaaactgccgagttcacctggtatcatcgaagcaattccgattactgtcgcagcaataaataacggaacaacatcgcgaatactcacatggatacccatcaacaaaccaattgaaatgaaactgactaacgtccccgtccactcgagaaaggaggtcgcgatcaattccaaacgatgtgaacttttcaggtcgcccagatattctcctttaccgaaaagacttaaacaaaagacaattggaaaatagaggccaccaccaattaaccaaatccagtattgtcgtagatattgattgtggtcgtcgaacataactaagaaaaaagaaagcagtgcataaattgaaagtcctgacattgtaaagactaaaatttttgataatgcttgaataacttttttcccagatgtttgtttgccataaaattcagagcgtaatcccgcactaacgaagccaccaaagccagcaatattgtttagggtattaaccaaccagcttgtttcaaagatgtataacttctttggtctctgttctaagatgttatttaaggtaaaatcgtagccgatcattgggaccacagaaactaatccgattagtgccattagcaaaatattccagatgctgatttcgctaaaaatagttgaaagctgatcaaaggaaattgtttttgcaatattggataactcgaacaagacaataataataactgaaatcaaaaagattgttttaaatttacttaaatgtgtttttatccatccgataagattttccatcgaatcactcctcaccaattaaaaattgaaggacttcttgattgaaacgctttggatttctacgcgcgaacatatgtccttgtcctgaaacgattgcaaaactcgcgtttggaatcgaacgagcaatatacattgaatgttgcgttttaattgaatcatgtttacccacgataaccaaagtaggagcctgtatctggttcaagtcctcagttgtcaacccgatatcgcggaaaagcagacgcagaatgggtaagaaatttcgcatacctgtatctacaaacgccccgatccaaacgatcgcgtattgtacataactcaagagatgataaagcgttcgaacaccactaggaaccgtatttccagcattcaaaaccagatgatccactttttcaggaaaaagtcgcgcaaaaaccattgccaaatttgcaccatcactaaagcccaagagatcggcatgattaagtccttcttgtttcataatggttgcgagatcttctgccattaagtgaaaacttgtttccttttgcgtattagttgaacgaccatgtccgcggctgtcaacaacataaacgttgaaatgtttgctgaaactgtttaattgttttgaaaagtatcgaccgcttccgccgttaccgtgaagcaaaaagagcgctggcccttttccgtatttttcgtaataaatttctgaaccatcgctcatttgagcgatttttttttcatttttcacaacatcacctaccagtgttaagtataccgatttttttaagtattgcacattaatttaatcatggaataaaatgaaaactttagaatgattaattaaatataaagctatcatattttacttttaaaagattgattgactcttgtagtatggaaagagaaaaaagaagacagatgggtagatttcatgttaaagataattggaaaacttttgaaaataattattatagttgcaattctcacggtccttgtggtcggtggattttttgcaattcgaatatataaaaatacaaatactgtcaacggctatcgcaacgatgtgcaagttttggcggatcaagcaggggtaggagattatacggacgttattttaggaatcatgtatactgaatcaaagggtcaggggacggacctgatgcaaagctccgaaagtgcttatggaagtcgtggaaagattattagtcaacaagagagtatcgaaagtggcgttaagcattttgcggaaagctataagcaggcgaaggctgctggatgcgacctcgacactgcaattcaagcgtataactttggaacaaaatatattcaatatgtgcaagagcacggtggtaaaaatagtgtggagcttgctgaagaatactcgcgagacgttttatccccaggctatggcaatgatcagcagcacacttatcgttatatgcaattgcaatctgtgttatacaatggcgggtatctgtatcaaaacggtggaaacatgttttatgctgaaatcgtgcaaatgaataagcgtttcattacgatgtttcaaaggtttcaagatagttaaaataatgagcggaaagcttgtaataataaagaaatatgctaaaatgatagacgtataagtttgtctaaaaaaatcgcgctgatcgagagatgaattggggcgattttttacggctgttatcatatttttgggaactggggtgaggtttttttggcgcaaagaattccccaacaagtgattgatgaggttcgtgagaaaacaaatattgttgaagtgattgggcaatatgttcaattaaaaaaatccggcaaaaattatttgggactttgtccatttcacgaagaaaagactccatcattttcggttgctgaagacaagcagatttttcattgttttggatgcggtaagggcggcaatgtttatacttttttacaagagctagaaggaatcagttttcctgaagctgtaaaaaaagttgccgacatggaacaaattcctttaggtattgagatttctagtgagcctgtgaaccaaacgtcaacagggcagcaacaattaattgcgttgcatgaacgaacgggagacttgtatcatcatctgctaatgaatacgaaggttggtgaagaagcgttagagtatcttcatgagcgcggtttaagtgatgatttgatcaatgaatttaagatcggttttgcacctagtcaacgggatttcttagttcaagtgacacaacaagacaaggtgaatgctgatttgatggaacgcagcggattatttattcgtagagatgacggtagctttagcgatcgtttttatcagcgagtgatgtttcctctgaatgattttcgtgggaaaccgatcggattttctggacgtttgttgaaaacaaaggattttcctggagaagatcagccgaagtatctgaattctcctgagacggagctattcaataaacggcaggtattgttcaattttgacaaagcccgaaacgaaattcgtaaacagggggaagcaatactatttgaaggtttcatggacgtattagctgcttggcaggccggtatcaaaattggactagcttccatgggtacaagtttaacggagcaacaaattgcgacaattgagcgtgtgactggtcaagtggtaatcgcctatgatggtgatgatcctggacaagcggcgacggaacgtgcattaacaattttagatgcacatagtcgattgaatctgtccactgttactgtgccggaaaaacttgatccagatgaatacttgcgaaaatacggtgagactgagttgcagaatttgttgcagcatggtcgccagactccttttgcttttaagatgcattatcggaagaaagggttgaatctggataatgaagcggatcgtttgaactacttggaagtcttaatgcaagatttggcaaaagtccaatctccagtagaacaagatttgtatttgggtcaattagccaatgagtttcatttgacgcgagaaagtttgaagcaacaattgcaaatggttcgccaaacaatccgtactgagcgacgtcagcagcaagctccggtttctacggcaccgactcaatcggtcaaaagagtattgaccaaagaagaaaaagccgaacgaatgttactgtatcggtgcatgaatgaaagttcgatccgtgaacaattagtccagatggaatttcaatttatccacgatcagtatcaagaattgcttctttacttagatagttatatgatggttcatggaaattttattttagcagacttcctgaactatttaaaagaggaggagatgaagcagctagtcatcgacatctctatgatatccatgtcagaagatagtaacgaacgagaaatctatgatctgatgcgggtaatttcccaatctggtattgctgaggaaatcaaacaacgacaagaagagcagcttgaggccagaaaaagtggaaaccagcagcgggaattagaattaaccgtgcaaattatcgaattgacaaaacgcttgaaacaagcctagaagtgaaaggggcatttattttatggcagatgtaaaaaacaaaaaagagtacgaaaaagctttagcagccttcattaaggagaaaaaacctttaggacaggtggtctacgatgaattaaccaatcgtttggcgacaccttatgaattaggtgcagaagcaatggatgaattaatccaaaaagtcgaagatgctggtgttagtgtcgttgatgaaaatggtgaaccttctaaggctagcttgaaacaaaatgaagaaactgcaaaagccgcacaaaaagaagatttatcggccccaactggcgttaagattaatgacccagttcgtatgtatttaaaagaaatcggacgcgtttcattgttgactgccgaagaagaagttgagcttgcattattgatcgaacaaggggatcaagaagcaaaacaacgcttagctgaagcgaacttgcgtttagttgtaagtattgcgaagcggtatgttggacgtggaatgcaattcttagatttgatccaagaaggaaatatgggcttgatgaaggccgttgaaaaatttgattaccgtaaaggtttcaagttctcgacctatgcaacatggtggattcgacaagcaattactcgtgcgattgctgaccaagcgcgtacgattcgtattccggttcatatggtagaaacgattaataagttaattcgtgtacaacgtcaattactacaagatctaggccgggaaccaacaccggaagaaattggggctgaaatggatctgcctactgaaaaagttcgtgagattttgaagatcgctcaagagccagtttcattggagacgccgattggtgaggaagatgattcacatttaggtgatttcattgaagaccaagaagcgacaagtccagctgaacatgcggcttcagagatgttgaaggaacaactagaagatgtcttggatacattgactgaccgtgaagaaaatgtcttacgtctacgttttggtttagatgatggcagaacacgtacattagaagaagttggccgtgtatttggtgttacccgtgaacggattcgtcagattgaagcgaaggctttgcgtaaattacgccatccatcacgttctaagcaattgaaagactttttagaataaaaaaacatttaagctcctcgaggatttccttgaggagcttttttatggcaaaaatacagctaaactgcatgattgtgcaatttccaaaaagcatacggaatttattatttttgattaattcgttcgaaaattgcttggaacatccctaaacatatgatagattaaagcatatgattgaaaaaaaggagccgatttcattgcaaaaatgccctaactgtggttatgaaccagtcgaaggatgcacaacttgtccgaagtgtggcttttcactacagttaaatgatcaagaaaataccaaagaaatcaatgataaaaatgatacgatcgaatggtctgatctagcagatatgccaattgaatctgtgcaaaaaatgtttaaggataacgaggataaaatgaaagaagaaaactctaaagaatcaacggaagaaactcctgaaatgaatccgatattagcgcagtatattcgtgagcataaagaaggccaggacaaacccgaaaatagtgaaactgaaaataaatcagaggaagtcgatgagacagattctgttaatatcgatgaaaataagattgcagagacgaaagaagtaacaaatgacaaagctccagagactgactatgaagaaattgcagaagaacaaaagagtgaaatggacgaaccaatagaagaaacggctgaaaatgcaattgaagcagagaatgaatcgaaggaagcatatctgttagatcctgcagttccttatgacgaagaaaacacagaatccgcttctgaagagatagaagaaacaccacttgattcagaatcaaataatggagctattccgccaggagatcaacagtcttcagaagaaaaacccaagaaaggccgcaaaaaggtttatatcacacttgcggcaattgccgtgttaggtattggtggcgcttattactatcaacacgagaaggaagttgaagcgcagcggattgcaaccgttaaaaaagaaaataaagtccttgacacgattgaggaaagtattgatagttattacacggacgatcaacacacatttctcgttgccgacaaagtgaatcttaacacgggtaaaattgatgaagaattatccaagtataaagatcacaaacgatacgatgaattgaaaaaagagtacgatgagttatcgaataagcaaaaggctgagcaatctgtaaatcagctattcacaagccctgcgatcaatgggaacaaactagcagacaaaccattattgaaaacagccgaacctgtgaatcttactgttaatacaggagataaagagtttgatactttaatgagtcaagccatcacgaatgcaaaggatcaatataccaagtttgaagcagcgaaaaaagcggctgatagtttgttaaaggacggcaacgtaattgattctgtcaatcgtgatcagtacaataaggctaacgatgcagtgaaagcggtagctaatcaagagctagtgcagactcaaaaggatgaattaacgaaggttgatcaaacgttgaaggataaagagaaaaaagctgctgaagagaaagcagcagcagaaaaagccgctcaagaaaaagcagaacaagaaaaggcagctcaagaagcccgagatagaacttcttctgatactagtcaggcaggagatacaagtagtgatgcatacgcttgggcgccaggcgtcagggagaaggttatacaaacatgtatttcccgtggatatatcgtggaaggcggatatagcttagaaccagtgaaagttgaaaatggagaagggtattataatttatacgccacttctaatcgtgcttcattgacaaaaggctactcggatagcgacttgccaatgtacctagtaacgatcaactgtaaaactggatggttcaaaggaaacgggccaaactaaaataaaaaaaatagaggctgggaagaaagttttctttccagccttagtcatgagctgtggtaaaataggagagatagttagttttaaatggtgtgtagaaaattagatgtagtaaaatcaaaaggagcagcaggtatgaatgaattattaggtcaagtttttacaggcttgatcattgatgaaaatgacatgatgtatttagtacaaaaaaatggggtaacgttccgttttttgaagactgaggatacctcttataaaatcggagaatcagttgaaggttttgggtatgtgaatcaaaagaaagaggcgatttttaccacaataatcccccaagttcggattggacattatgcttttggagaagtgacagacgttcgcagagatttaggtgcgtttgttaatattggattacctgacaaagatatggttgtttctttagatgaaatgccgagtatgaaagaattatggcctaaaaaaggtgatcgtttgatgatcagtttacgtgttgatgaaaaggaccggatgtggggtgttttagcagatgaagcgatttttcattcattaagccgttcaggtactgctgagatgcagaatgagaataaaaaaggaacgatttatcgcttgaaagttgctggttcatatttaattacggatgatttttatattggttttgttcatccctcagaacgttatcaggaaccacgcctaggagaagtcgttgaagctcgtgtcatcggtgttcgtccagatggtgttttgaatatgtctttgaaaccacgcagctatgaaatgatcaatgatgatgctgcgatgattttgactatgctgcaaagaaatccagaccactcattaccttattgggataagtctgcgccagaagaaatcaaagaggcgtttggaatcagtaaaggccagtttaaacgggcaattggtcacttactgaaagaaaaattgatcgaacaaagcgaaggtcaaattcgtttgaaaagctaattgagaatgtccttgcataaataaaggtgataaactataataattctaagaaaagcagcaattacttaactgttagtttagaattattctaaaatagatgaaggagggttctcttgaacgcaatcctagccttacaaaagaccaaaaagcagctccacgattcgggattcaagttgacacctcagcgcgaagcaactgttctcgtattattggaaaatgaaaaagatcatttatcagccgaggagatatactttttagtaaagaaaaaaagtcctgaaatcggcttagcaacggtttatcgtacattagaaattttgactgaattgcaaatcgtcaacaaaatcagctttgatgatggtttagctcgttatgatcttcgtaaagaaggagcagagcattttcatcatcatttattgtgtcttgaatgcggaaatattgaagagattgaagaagaccttttaggcgaagtagaacgtgtagtagaatcacgatatcactttttagtgaaggatcatcgtttaacttttcacggcatttgtcaaagctgtcaagaaaaaaaagaagcgtaaggcttcttgagaaaaacggattaagttataattaatttatatagtcccttgcaaagatacgtgctatcatttcaagggactttttgttatgataaagcgaaagtggtgagaacatggatgaacaaataacggaatatttgcattttttaacgattgaacgtggtctttcagaaaatactcgtgtcagttatcaaagagaccttcaccagtatttgtcctttttgagtgaacaaggggtcaccgaatggcaggctgttgatcgttatatagttgtggcttttttggcaaatttaactgaagctgggaaagcatcaactacgatcacgcgaatgatttccagcttgcgtcggtttcatcagtttttacgtcaagagcgttacacggatcatgatccgatgcaacatatagatagtccgaaaaaagctcaaaaattacctcagacgctttcattagcagaagtggaacgtttgatagccgctccggatacgacgacagacttaggaatccgtgatcgtgcaatcttagaagtaatgtatgcgacggggctacgagttagcgaactgattggtttgaagcttggagatatccatttagagatgggtttattgcaaactgttgggaagggcgataaagaacgcattgttcctcttggtgattatgcaattcattggctggaacgttatttaaccgaagtgcgtcctttgttaaccaagaaaacaccaaacgtaatgtttctattcgttaataaccacggacacgggatgagccgtcaagggatatggaaaaatctgaaacaatatgtaatcaaggccgagatcatgaaggatgtcactcctcatacactgcgccatagctttgcgacgcatttgttagaaaacggggcggatttgcgaactgttcaggaacttttgggccatgctgatatttctacgactcaaatttatacccatattactaaacgaagaatgaccgaagtctacaaagaattttttccacgggcctgataggaggaaagaaaatgcttagtcactatcgaaaaaatcaacgaaaaatcgcaatgggccttttaagtttccatgaaagtttgaaggaccatcagcacttgctaaaagaaattgatacctatgaagataatgatcgttatcagctttattgctattacgatgaacattcagataatgttcaaggcgtcgtgggagtcagccagcttgaagaccaagaaattgttttgcatgacatcagcttaaatccttcttatcgaggagaaggtgtgagcctaaaaatgatggaagaactacaagcgctgtatccagatcaaataataattggaacaccagcaacatctgctttcttagcgaagtggcagaaacataagcgaggataaaatggagacaatcagtttaaaattagatgtttttgaagggccattggatttattactgcacttgattcagcaattggaaattgatatttatgatattccgatagcagcagttacagaacaatatatgaattttatccacgccatgaagacattggaattagaagtggccggtgaatatttggttatggccgcaaccttaatgtcaatcaaaagtcagatgcttttgcctaagcctgaggtggcatttgagtatgatgacgaagaaggagaagatccacgagacgctctagttcagcaacttttagaataccgaaaatataagtatgctgcttcggtattgtcggaaaaggaagaagagcgtagcttgttttatacaaaagcccccatggatctttccgaatatgaggaagaaatcttacctttaccgaaaaatcaattgaataccatcgatctctttttagccttgcatgatgttttacaacgaaagaaaagaaatcagacaatcgaaacaactgtaaccgccgagacgattacggttgaccaaaaagtgaatgagattggtcgtcgattagaaaaattatctgagaatgaaggcttaccactagagtctttttttgtgcagtataccaaggatgaaatgatcacaacttttatggcgttgttggaattgatgaaaaaaggtcaagctactgcaactcaggaagaaacatacgcaccaattttgatttttaaaggagtcattgtatgaatcaattaagccagattgaagcgatgctttttgtggtaggtgaagaagggattagtttagaagaactggcctttactttaaaacgccccactccagaaatctatcaaaacattatagatctgaaggaatcatatgaaacgaatgctgcttccgcattaactttgttagaggttggaaatcactttgttttaagcacgaaaaaggagtttgctcctttgttaaaagagtttgcacgttctccaatggctaaccgtttaagtcaagcagctcttgaaacactctcgatcattgcttacaaacagccagtgacacgatcagaaattgatgaactgcgcggggtacaatcaagcggagcagttcaaacattagtagcacgacagctgatcgaagaaaaagggcgtgttgatggtccgggtcgtgcaattttatatggaaccagcgcttatttcatggactattttggattaaaagatatggaagaattgccggatgtacaaaagatggaagcagatctagctgatgaggatgaaccattagatttattttatgatcgctttaaagaagaggatggacaataaatggaaagattacaaaaggttatcgcccacgcaggaattgcatcgcgtcgcaaagctgaagagtatattactggcggtcgggttaaagtaaatggtgaggttataaaggagcttggaacaaaagtaggtaagaaagatattgtcgaagttgatggtgtaccaatctatcaagaggagcccgtgtattatttattttataagcctcgcggtgtaatctcagccgttagtgatgataaaaaccgaaaagttgtgacagactattttgcagctgttccagaaagaatttatcctgtgggacgtttggattatgatacgtcgggtattttaattcttacgaatgatggtgacttttcacaacgattagctcatccaaagcaccaaatcgacaaggtgtatgtagctaaagtaaaaggatacgcagagaaaagagctcttttaccattgaccaaaggtatccgcattgagggaaagaaaacagcaccggctcgttttgaaatcctttcagcagataaaaaagccgaaacaagtatcgttgaattaacgatccacgaaggccgaaaccaccaagtcaaaaacatgttagcagcagttggtttgccggttcagaaattaaagcgagaacgttatggtgatttaactttacagggattgcgtcctggagagtatcgtcgtttaaatacaaaagaaatcaatacgttgttgaatcagtcaaaatagaaaatcatttacttgttttttgaaagtaaacttgttatagttaattcacaataaaaaaataatttatggttcgtcttcaggggcagggtgaaaatcccgaccggcggtgatagtccgcgaactgcgcaagcagccgaatcggtgagattccgataccgacagtacagtctggataaagaagatagagcttatttgagtgagattgtattcaagtaactctatgcttttttctgaagcatagagtttttttgtgtcaaggtctggctcaaatggttcgttgaagatgattccgaaacggaggatttcatatgaagaacttacggttacaaaaaatgacggcagtggcagtggcagcagcaatgggattaattttacaacttatcgcatttcccattctccctatgtttccttttctaaagttagactttagcgatattccagtgttgattaatatgtttatctttggaccattaacggggattgcaacagcttttattcgttcattgctgcatttgacaatgaccggtttttcgatcgataatttaattggagactttgctagtttcttcgcctcaactttatataccttaccgatttttctaatgtttagaaaaagaacaacttcgaaacggattttaggtttaggattaggtatcttggcgatgacgatttttatgagtattgcaaattactttgtgattacgccgctttatttgaaggcatttggactttcagccggacaaatgctaggaatgggattaggacgctatattttagtagggattgttccattcaatattcttaaaggtatatctgtcagcggtgttttcttagtcttacacgccaagttattaccgtggttatcgaaaaagacgatgacctcgcaacatcattcagtataagtaaaaaatctcagacaaaattgtctgagatttttttgaaatttgcttgttttcgtgtactttttttaaagtatgttatcattaattttgatataagatagcatgagacgggcatcgtttggctgactgaataaccgccgcttgttgatcttcagggataaactcgtgattggcttcaggctctccaacaaataggacgagaccggcgtcagtataatcaaatatttctggagcgatcgtttggcataacccgcaagcgatacagcgctcaggaatgatttcgcatttcattttttcaccttccacaggagattttactatgactttttttattctaacgttatttcaatctggctacaagataagaacctcgactttgtatcatttattggtcggaaagcgaacaagttctgtcttgctgcacggttttttttatcataatttaatttatttaggagcgctgccaaatttacaggatgctgactttcagagagaacttaagaaattagttgctgctgattggattatcatcgataaaggctttgggatgctgacctctcgaggcaagaggcaattagctgaaagaaagtatgatcttaatggattggataatttacgttatggtcgcacacgggagaattcttggcaactgcttctatttgcggtgcaggtcattagtcatttatcttatggtaaaaaagaatacataccaattgaaaatcgacctttctatttacagcagatcaaaaaatggttggtgggttctgggccaaatttagtcaaacacttccagcaagaattactgacgatttttcaacaattgccttctaaagaagctgattttttagctaatcagttttctggctatgattttcaagggaagacagcctttcaattattacctgaaaaatatcaaaatactccatgggatcaactttttcgacagcatgcaattgatctttttttggctcaggttaaaaaaggagagctggctagattattatcagcgttggatcagcagaatcttaataaaagtatgttgaaaaccagagaatactttctagctggtaaaacagaagctgaaattttacgacttcgacatttaaagcaaggtacgattaatgatcattttattgaatgggctttgctagagaaagcatttccctttgaacgtttcgagctgcttgaatttaaccagttaagcagtgaagaggtactagatcaacgataccaagagtatgacataccgtatttaaattttcgtttgtcacaaatttattatttgagggaaaaacaatggacttaacacaattattaagagaaaaatttcatcatgatcagttcagacctggccagcaggaaattattgagacgatcctaaatggagaatcagtgttaggaatgttgccgacaggaactggcaaatcattgtgttatcaactgcctggttatttaatagatgggacagtaatcattatttcaccgcttatttctttaatggaggaccaagtagctcagttgcagcgacttggcgaaaaaagagctgtagcgctcaatagcttgctttcttcttgggagaagcaatggattttaagtgaaattcaccattataaatttattttcatgagtccagaaatgtttttgagtagcgaggtccaaaaggctttacaggctgccagattagcgttgatcgtggtggatgaagctcattgtatctctcagtggggaatcgattttcgaccagaatatctgaaaatagccgatggtactaaattcattggcggccctttagttttggcattgacagcaacggctacaccggcagttcgaatggatattcaaaggctattgtttagagaaaatcaagcaaaggaatttattttttctgttgaccgtcctaatatcagttactttgtctaccaagagactaaattggaaaagctacaagaactgataacgaccttagagggttccggtattatttattgtgctactcgaaaaaaagttgaagaactgtatcaaacgtttaaacaccagcacgcgattgcctattatcatggtggtttaagcggtcaagaacgacgaatgcttcagcagcaatttttagcagacgatttacggattttgattgcaacgaatgcatttggtatggggattaacaaagaaaatattcgctttgtaattcattatgatttgccagattcgccagagaactatttacaagaggttggtcgtgccggtagagatggtcagccaagtcaagcaattttgttatatgaagcaggtgatgagtatattcatcattttcttcaggagcaaaccgatcaatccaaaaaattatttgagatcaagcaacgaatgactgatttggtctttgaagatccgttaataaaaaaatgggagcaatttttccccaacgaaagctctcgcttaatggatttattaagccaacgaggtaagactaaaaaaattcaactacaaaaaatgttggattatatttcgacaaaggaatgtcgtcgagcttttttgatcgcttattttggtgaaacatccgctggggaaaatcataattgctgcgataatgatggtgctttattgaaggcgaaaccagtgaaacagttaaacagtgaggcccacctttcttgggaaaaaattattcaaaaaatttttaaaaatgatgagaaagattgaaaattgacgccacattttcaagagctatggtataatacatggcgatagcatttaggaggttagagaaattgagtagaaaagatcgctataacgatacgaacaacgaaccgtgggatcaacatatttacgaatctgatagtgaagaagaaacctattcacgcagccagtctcgtcgtagtggtggtggaaacaaaggtggcggaaatacgaaattcttgacgattctagtcgcattattattagcccttattttgattccagctggtgcctttttctggattactcgtgataacgacaagccagcagcctctcctgaaagtacgactcaggtatcaaaggtttcttcaacagaaaagtcaagcaccgaagaaagtagtacagaagaaagcacatcttcaactgattcagaagcaaatcaacaagagcagcaacaagccgctgatcagcaagcacagcaacaagctgcagctgaatctcaggtagccgcagaggcacaagcgcaagcagaagcatcacgttctgcagccgcagcgcaacaaacaacaccatcttcaagtacaacgaatgatgcaaacgcacaatacggtacagttcaagcaggtgaaggtccacaacaaattgctggacgctatggcttgagtgtcgatgaatttttaagactgaatgggatggatagaagcaatttctattttgatccaggtcaacaagtgcgtattaaataatttgaatactttgccgtaatcgctagcgattacggcttatttattgaaaagaggcagaaacatggaaaaaatttcaattgcaatcgacggtcccgcatcgtctggtaaaagcaccgtagcaaaaattttagcgagtgactttcattttatttatgtggatacgggtgcgatgtaccgagctataacttttttagcaatcaaacacaatattgcattttcagatgaagatggtttagccgaattaacaaaaaagtatccaatcaccttcaagcaatctgctcatggacaacttgtcttcgctgatgatgaagagatcacacaggcaattagacagccggacgtgacgggggctgtttctgaggtatccgctcatggaaaagttcgtgaagaattagtcgaagcgcaaagaaagctagctcaagtcggcggtgttgtcatggatggtcgtgatattggtacaaccgtactgccgcaagcagaagtgaaaatttttctagtcgcaagtgttgacgaacgagcacaacgtcgatataaggaaaatcaagaaaaaggaatagagatggattttgaagcgattaaagaggccattgctaagcgagattatttggattcgcatcgggaagtttcgcctcttattcaggcagaagatgctgaattggtcgatacgactggaatgtcgattgaacaggtagtaacgaagattaaagaggtaatccagtcaaaaggtttctaaattttggataaaaacgataaataaagcgaatttctttcaattttttagaaaaaaagaagaaatcgctttatttttcatgtggattcatctaaaataggatatgtagtgcagtttacgcagaattgttggtaaggaggacaaacgacatgacagatttagaacaaaattcgatggataacgagaatgtttccatggaagcagcaatggaaagtgtgaatgaagttcaagttggcgatattgttaaaggcgaggtgcttgccttagaagataaacaagttatcgttggtattgaaggtgcgggagtagaaggtgttgttcctgctaaagagctttcaactttacctgttgaagatatcaatgaagaagtcaaggttggcgatattcttgatttagtcgttatctcttctattggaaaagacaaagaaaatggaagttatctcctttctaaacgccgcctagacgcgaagaaagtttgggaagatattgagaaagaattccaagatggaaaaatcatcgaagcaccagtaaccagcagcgttaaaggtggtttggtagttgatgtaggagtgcgcggatttgtacctgcttcaatgattgatgaccattttgtagatgatttttcggtatatactggaaaaacattgaaatttaaaattattgaaatcgaaccttctgagaatcgtttgattctatctcataaagcagttgttgaagcggagaaagctgagaagaaaaaggaaatcttagcagacttgtatgaaggtcaagttatcaaaggacaagttgctcgtttgacagactttggcgcgttcattgatcttggtggcatcgacggattggttcatgtgtcagagatttctcacagtcatgtggcaaaacctgctgatgtattaagcgttggtgatgaagtagaagttcaagtcctttctgttgatccagaaaaagaacggatttcattatctatcaaagcgaatctgcctggaccttggacagatattgaagaaaaagcggctccaggttctgtacttgaaggaactgtgaaacgtttgaccagttttggtgcatttgttgaaattttcccaggtgttgagggcttagtgcatatctctcagatctctcacaaacatattgcaactcctcacgaagtgttgcatgaaggcgaccaagtacaggtgaaagttttagaagtacatcctgaggaccatcgtgtggctctttcaattaaagcattagaagagaaaccagaagaagcaaaaccagagccggtggaagaagactcatatgagttgccagaagaaaatactggtttcacaatgggtgatattttaggcgatgctttaaatgaagattcagaagaacaagaatagaaatcattcaagacgtgctttagcacgtcttttttgtctggtccgttttcagcataaatgaataccttatattttaatgaaaatggctccttctcttgcaagaaggagttttcttagttaaactaaagagaatttggaaaaagcaccggcatttttagaatgtcgggtatctgctgtatctctcagatgatttttttctagtagaaaagtaattaatagaaacgaggagttaaattatgtcaaatcctacaattgcaattgttggtcgtccaaatgtcggtaaatcaacattgtttaatcggatcgctggagagcgcatttcgatcgttgaagatactccaggtgttacacgcgaccggatctatgcaaaaggcgagtggctagaccacgaattttcaattattgacaccggcggaattgatattggtgatgaaccatttatggagcagattaaacaacaggcacagatcgctatcgatgaagcggatgtcattttacttgttgcgagcggaaaagaaggcgtcactgatgccgacgaagctgttgctaaaatcttgtatcgtagtaaaaaaccgattatcttgatggttaataaggtcgataatcctgaaatgcgaaacgatatctacgaattttattcactgggtttaggcgaaccgtaccctgtatcaggaagccatgggctcggcttgggagatgtactggatgaagcagtcaaacatttcccagcagataatgaagaggatgaagaccagtcaatcaaatttagtttgatcggccgtccaaatgttggtaaatcttctttgattaacgctattttaggtgaagatcgtgtcattgtttctgatattgaaggaacgactcgtgacgcgattgatacaaaatttgttggtgaaaatggccaagagtttacgatgattgatactgccggaatgagaaaacgtgggaaagtttacgaaaacactgagaaatattctgtgatgcgtgcaatgcgtgccatcgatcgctcagatgtcgttctcgtcgttttaaatggagaagaaggcattcgggagcaagataagcgaattgctggatatgcccatgaagcgggccgtggagtgattattgtcgttaataaatgggatttggtaaaaaaagataccaataccatgaaagaatttgaggaagagattcgtgatgagtttgcctacttagattatgcaccaatcgtctttgtgtctgctataacgaagcaacgattgaacaagattccgatgatgattgaagaagtcagcatgaatcaaaacttacgaattccttcatctgtcttgaatgatatcatcatggatgcggtagcgatcaatccgacaccaacagataaaggcaaacgtttgaagattttttatgctactcaggttgcggtaaagccaccaacttttgttgtatttgtgaatgaagaagaactgatgcatttttcatatgcgcgctttttagagaatcaaattcgaaaagcttttgaatttgaaggaacaccgataaaaataatcgcccgcagaagaaaataaggtattttatcatacttttattttgctgacaacagatttcactgaatgataaaacaaccatgaattttatgccattaatcgctaaaaaccttgctaacataaggttcttatgctatcgttataacagaatattgaccaaatcaatatttctttactgatgactggaccactcagtttatcagttgatgtttttaacatcaatactcatttctcaggaggtgaattcattcatggcaaacaaagcagaattgatcgaaaaagttgcagcagctactgacttaactaagaaagacgctacagctgctgtcgatgctgtattttcaactatccaagacgcattagctgaaggtgaaaaagttcagttgatcggctttggtaactttgaagtacgtgaacgtgcggcccgcaaaggacgtaacccacaaactggtgaagaaatcgaaattccagcaagcaaagtacctgcattcaaaccaggtaaagcgctaaaagatgcagttaaataatttttgctgctgaaaccgttgtgactctaaagtcgcaacggtttttttctctaaaaatagaactaagattatttgaatcttatttccgcgaagaatcgttatttcactcaatttttaacttatttttcattttacgaaaggctttgcttacgatagaataataaagaggatttaatgaaaaagaagaaggtgggtgaagcgatgtcgaaggagaaattgtactatgtaccaaaaaatgattcttggcattcatatgaatttcttgcacaaagacaaaatgatcctaagtggcgacaagcttttttggaggcagaagcacaaatagaaagagaagataaaaagaggaagcggcgcaactttatcatattattaatatcagttccactaatactcatcggtgtgatggttggattatatttctacgggtcctccgatgatgaagttattccaaagcgggaaataagtttaaatgattctacaggtgtgtcaacagaaacaactgctgaatcatcaacagttgatacgtcgagtattggacaggtattgactacaccttggggagaacaggtaacggtcctgcgtatcttgtcaaatggtgaacgggtaattaaggagggttattcgccatcagatttaaataacgatggtgtgctcacctttgaggaattgtctcaggtggaagagcgggcaaatcaacaaccgtatcaacagacaccacaacaaggacagaattattatcagcaacaaacaccgcagcagggtcaaaacaatcagcaacaacagatcccgcagcaagaacaaaatcaacagcaaacgccgcaaggaaatcaaggcgttcaatcaaatcaatcaaatggagaacaaaacccttcgaatcaagaaacgccagtccaggaccaacagcaaacaccacaaaatcaataagtcatataatttatgtgtagtgagttttcaatctattcaaaaatatagaaacttgaaagattttgaggaatatcctagaaataactatcagcctttcgcagatttgttgcgggaggtttttttgtagtataaaatgaagtaaacggggtgaacgtgatggaagtaacataccgaaacaaacttcaggagacgcgaatcacgtatggtgaaaccgtcgcttcaatgatgcgcaaaaaagatttggaaaataaacagattctattttgcggcaaccagcgttattatgatttatacgcggaaaagttaagacaatttattccaaaatcaagtacacatgattggttcatcacgccgaataatcgctattgcaatactatggataattttcaagagctgattcactttctggaacggtttagtcggcaaaaggaaacgatttttcttggaattggtaatgaaggggtaatagaactgttaggatttactcaccatgtgacaaactttgataccgagctgtgctttttaccagtttcgctgagatcctttgctcaaagtctctcgtttgttgatcaaattctctcagaaaaaaatttaatgacagtcatggagattgaagaggtgcctcaaagcatcctatttgatcataccttagcagatcagcaaaaaaccggcaaaatggtggatctattgacgttgattcgctgtggaatcgtttgtgattacccttttttacaaagtctgtatgtaaattttcctaccagcgaggcgcttttgcagcagtcattctcggcgtttagcgaaagactgatcaattattatcaaaccaacagtcaacagctcaatgatttcgggaaaacctttgagaaagctttttttcaaacggaaaacggctcgctgctgtcaaatagtatgaaaacaatgttcggtctattgtttgaattggcatggaatgtttcagcaagtaatcttcatttcaatttcaaaaattttatgatatggttggtgcaattaggttttccaatcattgtaccagaaggcatttcgctggctgattatggtcagcaggtgattgcactagcaaaagaaaaaccactggcgggattaattcaagtcggtgaagtcggaatgaaaaaggttccgacgcaaaaagaattacttcaaacatttgaaatatatcaaaaaatcgttacagagatcaggggagaatagatgtcaagttatagtgaaaaaatgctcgcagcactaaaagatgaagatttaggcgaggccaatctactgttcgaagaggccctaaaaaatgacgaaccagaaatactggcaagtttagcagaagaacttcaagcattgggatttctagaggaagctaaacgtattttggagaaattgttaaaggattttccagaagaggatgtcttttatctttcattagcagagattgccatcgagaatgatgacattgatggtgcctttgaatatttagaaaaaattgaaccagaaagtgataattatttagaaagcctactagtaacagctgatttgtatcaggtcttaggcattccagaagtgagtgaagcaaaattattacaggcaaaaacgattgcaccagaggaaccgttgattacctttgctttagctgaacttcactttacaaccaatcaattaggagaagccatcaatgaatatggacagcttcaaaaacaaggagtcgacgaaattgccaacatctcgattgatgagcgaatcggtacagcctatagtatgatggggggctttgaagaagccattccgtttttagaacgtgctttagagcaggaacatacctctgatcgtttattccaattaggttttacttactatcaaatccacgatcatcaaaaagcgatcaactatttgcaagagctgattgcgcttgatccgcaatatcaaagcggctattactatcttgctgacagcttgaaagaagaggagctgctagaagaagcgttgcttgccgctgaagaagggatcaaggaaaatccttatcaggtcgagctcttgcatttggcttcagaaattgcttatcgtttacgtgatagcaaaaaggcagaggaattattgctacaagctcttgaaacgggggataaaacggatgagtccctgttaaccttaagtaatctgtatttaaatgaggatcagccggataaggcgattgaaatgattagccaaatggaggaaaagggaaatccttatgccgcatggaatttagctcaggcttataacgaattagaggatttcgcggctgccggtacgtattataaacaggcttatgaggatttagctcatgaaccagatttcttaaaagcttacggcatctttttacgagaagatgggcaattggaaccagcccgcgctgtattaaccaactatttggaaatggaatcaggtgatttggaagtacaatcattactagaagagtagagaggtgaggaaaaatgatcgatgtaggtgaaaaacgcgaatttcttgtttggttgatcaacaatgtgagttttcaacggcgagaagtgatctggattttgaactatctaattaatcatgaggcgattttgcgaaatgtccatattgtggagcaagctttagaaacagaacgtggattggtttttcgcgatatcactcaacgagaagaaccgatggtattttcgattgaaggtcatcagttttctaatagtgatcaaatttttcatgagattcgtctgcattggcaacagcctttatacttggaatgtgtgtttccgcattcttggcaaaatgcccaatacttatccgtgcttgaggacaatcctgctctttcatggaatgacaatgtaagtgaggaaattatttcagaagttgagaatttcttgaagtaccaggaaaaagaagctcaaatgaatctactcaagaaacaaattgatatggctctagaagatggtgataaggaagcttttctaacgttatcagatgagttgaatcgcttgaaacttaagctaaatagttaaaagcatcgcacgactggcaatgaatgtcagtccgtgcgatgctttttaattggagcgttttaaagtaaatcttcgtcgctgaggccttaagtaagtaaatccttcaccctcaacatcatggacgttactaattaggataaaggccttttcatcaacagagtggatgatttttttcacttcatttatttcctgttgagaaaccacaatataaacgatgcgttttaattctgatgagaagccaccttcaccatgaagataagttacccctcgttccaaatgcgccatcaataattcagcaattacattgctttcgtttgagatgatcatcacacccttggctgcataaccgcctgaagatagtacatccacgactttactaaagacaaatgagacgattagtgtgtacatcattcgtttcaggtctaggtaggttaatgaacagatcaacacaacgatatcgaaaatcagcaatgattttcccatggtgaagccgatcttttgttccaatattcgagcgatgacatcagcaccgccggttgttccaccattacgataaaccaaaccgctgccaaagccggcaaataaccccgccaaaattgatacgataaataaatcgtggtccaagttaatctgcagagggattctttgccagatccacaagaataccgacaagcaaacggttcctaaaatggtgtaataaaaagaacgttttcccaaaatttttccgccaatcaaaatcaatggaatattgatgagtaatgttgtgtaggcgggatcaatgccaaaaagagcgcgaataatcaatgtaataccagtgacgccgccttctgctaaatgattcgcaatatttaaatagacgagaccaaatgcataaatcgctgttcccaccacaataaatagaatttctttgatccgtgtagtcatagtcgtttccatacgacacctcctgtttttatttgctgattggatagtgagtaaaacctgattctgtacaatttcagtcctcaaccaacatagcatgaaattcagatagttacaacaacatgataggaaacaaatctgttttttgataagataggtttgaggtggtttgatgaatgaaaagacaatgaaaatcatgcaacaggaagttgatgattatattcaacaatttaaaaccggttatttttccccgcttggccaaatggctcgtttaacagaggaagttggggagttggcccgcgaggttaatcattattatggagaaaagccaaagaaagaaacagagaagccaaaaacagtcgaagaagaactgggagatgtcctagttgtgacgattatcatggcgaactctttagggattgatttaacagagaccttcaatcgcaatatggcgaagtttaaccaacgcgatcgttttcgtttcgagcgcaaagatggtttgacggaaggggagacacaatgagattagaagcttttccattagaatttcaaggtgcgatgccgattctgcgtaaattgcaagaagcagggtatgaagcttactacgttggaggcagcgtgcgggatattctactgaataaaccaatccatgatgttgacatagctaccagtgcttttccggcagaagttaaggaattgtttcaccgtacaattgatgtgggcattgatcacgggacggtgatggtaattacaaaagaagctacctatgaagtgacgacatttcgaacggagtcgacctatcaggattatcgtcgtccggatcatgtggaatttgttcgttcgctaaaggaagatttaaagcgtcgtgattttaccattaatgcgttagccgtgggaatcgacggaacggtgattgacctgtttgatggattagacgatctgcgaaataaagttttacgggcagtgggaaatccctatgaacgatttcacgaggacgctctgcggatgatgcgtgctctacgatttgtcagccatttgggctttacattagagcctaataccttcgaggcgattcaagaatatcattcactattagctaagatatctgtggaacggatcaacgtagaatttgtcaaactaatgatgggttccttcagagaagcaggcttgcgttcttttgtcgaatcagaatgctatatttattgtccagggctgcgtgattacggcactgcgttattaaatttttctgagcttcacgggcctgccgttccaactgagcgacaagcatggacgcttttaatgatcatgttggatatgaatatcacagatatccgctacttcatgaaggaatggaaatgttctaatcaattgattagagaagtaactgagatggtaccggctctacaattccgtttgaaatttgagtgggataattggacattatatcaacttggcagagaattggcattgtctgtagaatacttactttattactttgatcgcgaaccaaacctagcaaaaattcgtttgctttatcaatttttgccgatctattcattgaaggatttagctttaaagggcaatgaagtgaaggatcattttgattatcctcgcggaccttggatcagtatgactttaaacaaattggagcaagaagttgttgaagggaatttgaaaaacgaaaaagaagcattacttgcttttgcagaagattttttagaaaaggagatgtcatgaaaaaattaatccagctttatcaagttaaagaagaacaaacagcgttaaaaatgggttcaggtgatttagaagtgttggcgaccccagccttagtagcgatgatggagaattgtgctaagcagctcttagcacccgaactctcttctgagcagaccagtgttggctttaaaatgacgttaaagcatttagtaccgtctactgtgggagcagaggtaaaagttgaggcagaaatgcttgaaaatgaaagaaacagagtgtcattttccattaaagcctttgacggaaagcaattgatcggggaagctgatcatcagcgagtgattgtagaaacagcagctttcctaaaaaaagtgaagtgagagcacaacatgtgaccgtttactcaaggtatgctaaacttgttttagattagtagtgaggagaatgtagaatggcaagagaaatgacagcgttaaaattctattttcgtaatggcgaaacatggacgattgatcgtcgttacattggcgatttgtggattaaacaaattaccactagcttcggaagaattcatggaagtgaatttgtagaaattcatccatgtgcgggattcaagatcgaaatttatcaagaaggcgaccatgttcaaacaacagatatcaacttaggcggactagagctaggaatgtttgaacgtgcacgtaaattcgaagacatcgaacggatggatattatttatcgtgcagggcatcctgattctgtgtatttcccttataaggacaaagacactgaaggtcttgacaatgtataccaatcaacaaaagtttctgaaaaaacaaaaagcttatatatcgtaattgatccaatgaaaaatgtggatgatgtatatggcgatcaattttaaaagatatttaagacaagcattcaattaaggatgcttgtttttttgtcacttttttgtgttggtgtgaccagaaaaagaattccctgaatttcgaactaactttacaattagtttatcatttgaagcagatttctaaagaaattactaaggtaccggaataattttgggtacttccttgatatattgttcaggtacctgtattatataaatgtaaggtacctgaacaaaataaggagagattattatggaaaatcaaatgaatgaacaatttatgaagctacaacatgacttacgacgttattaccatcgtcaaatggcaaaaaatcagggttacggtccacatcgaggtcaaggaagggtactagcattattaaagatgaatccagagattagtcaaaaagatttgacgttcgtccttggcatgcgagctcaatcagttggagaattattgcaaaagctagaggataaagaattgattacccgcgaagcctcagaacaagatcgtcgtgtgatgatcattcgtttaactgaaaaaggtcgcgaagaagctgaaaagatttctgatgcgccagattttggagaagagttatttgctgattttagcgatgaggagaaggcagaatggacacgattagttgagaaattaaatgaaaggttaaaaaatgagttaggcgaagaagattcagaggaattctttggtggaggtagaggcttcgatggtccacgaccaccgcatggacatggtccacacggaagaggtccggctcatttacgtcacttcttggattttgctgattttaattggtaagaattaagaaaggcttcgcgaacttgctcagcttttgagcaccaagtaggtactgttccatatcagctttgcaagcagtcgctgtgtgtctcagcaataagaccaaaatatttctaaatatttttgcttattgccgaaaaaactattttgtgaagccggatatggatatgtctcctgtaaagcgatatactcttctaaaaattttatactttttttatagttgagaaagccgtaaaggaaaaatttcctttacggtctttttttgttacaataacgtagagaaatttgaggatggtttgagatgaaagaattaaaagtaacagagctatacaaaacatttggagataagacgttatttgatcgtatttcctttttaattcacgaaaaagatcgaattggattgatcggagtcaacggaactggtaaatccagtctgctaacaattctagccggtaaagatagtggagatggtgatgtttcggcaatcgaaaaagcgagcgattatcggattggctacttagcgcaggaacagacttttactgaagaattattggttttggatgttgtttttcaagggaataatccactgatgcagacagtccgtgactatgaaaaggctttactaaacttatctcatgagaatactgcagaccttcagcgacaatttagtctagccgaagaatcgatgaacaagcaagacgcttggacagctgatagtgaagcgaaagcgatcttgaacaagttagggatagatacattgaataagcgaatcggagagctttcagggggacaaatcaagcgtgtcgcattggctcaagttctgattgacgcaccagatctcctattgttggatgaaccaacgaaccatttagactacgatgcgattcaatggttggaaagttatttgaaaagctatacaggctcactgttgatggtcactcatgatcgctatttcttagatcgagtgacaaatcgcatttttgagctttcttttggtaatctttatgaatatcatggaaattatgaagcgtatctagttgaaaaggctgaacgtgatcggatcgccattgaacaggaaggtaaaagaaaacagctgtacaaacaggaactagcctggatgcgtgcgggtgccaaggctcgaacaaccaagcagcaggcgcggatcaaccggtttgaagacttgaaagagaatctaaatcaagtcaagaccgatggacagcttgagatgaacattgcgacgactcgacttggtaagaaggttttggaagtaaagcaagcttcgtatgcgatcgaagggaaaacaattctggatcagtttgatttactaattcaaacgagggaacgtttaggtattactggaaagaacggggcaggaaaatcaaccttgctcaaccttttagctggaagattacaagtagacagcggtgttattgaaattggtgaaaccgttcgtttggcttattacacccaacaaaatgaaacgcttgatcccaataaacgaatgatcgcctatttgcaagaagcggcggaggaagtcaagcagcgagacggttcacaaattagtgtagcggaaatattagagcgttttttatttcctcgatttatgcatggaacactaattggaaaattatcaggtggcgaaaaaagacgactttatctattaaaattgctgattcaacaaccgaatgttttattactggatgaacctacgaatgatttggatatcgccacgttgacagtattagaggattatttacaggaattctcaggcgctgtgattactgtttctcatgatcgttattttttagataaggtagctgagaaattattgatctttgaaggagatgggaaaattgtttcttattttggctcgattatggagtatctagatcagcaaaaaccagtaaaagaagagaaggctgttaaggcaaaacctcaaccaaaagagcgcaagaagaaactttcctataacgagcagaaagaatgggaaacaattgaagatgatatcgcgttgttagaaagtaagatcgacgaattgacggaagcgatgaatcatcaaggcgatgattttacaaaattacaggatttacaaaaagaaattgatcagacggagcaggatctggatgagaaaatgaaccgctgggagtatctgagcgaaattattgaggaaaattaaaatttttattatgtggtaggaggaacggtatgttaattgcaatttgggcgcaggataaaaatggtttgattggtagaaataatcatttaccatggcacttgccaaatgacctgcgattttttaaagaaacaacgatcaatcacgctttagtcatgggacggaaaaccttcgaaggaatgggaaaacgaccactaccaaatcgtcaaacgattgtcttaacacgagataagagctatcaggctaaaaatgtggtggtgatgcattctttggaggaggtcttggcattttctcgcgagaatgacggagagacctttattgctggtggttctgcgatttatacagaatttctgccatactgtgagaaaatttatcggacttttatcgaagaaagctttgagggcgatgcttattttccagaaatcgaatggagtaagtggcagctgacggagcgaaatcaaggtcaaagggatgaaaagaacccgtatgattattattttgaaacttatcaaagaactgattcgtaaggacgcggttctttcaagaattttaaagaagtagtttcaacaatgatttatttcgttagttttgatatactgaaattaatttgaaactaggtatggaaagaaggatcagaatgccaaatgttaaaattgtaaccgactcatcttgtacgattgaacaatcggttcgagatgaattaaatattactgttatccctttgtcagtgatgattgacgatgtggtctatcctgacgatgatgaattaacaggcgagcgctttatggagatgatggcgcaggctaaaaatctacccaaaacaagtcaaccaccgattggctattttgcagaattatatgatgaattaggaaaagatggaagtcctatcgtttcgatccatatgtcacatactttaagcgggactgccgaagcagcgcgtcaagcaacgtttcttagcggcagtaatgtaacagttattgattgcggatttatcgaccaatcacaagcctttcaagtaattgaagcagctaagctagcacaagagggtgcatcgttagaagaagttttagctggtgttgaaaaagtgaaagatcacagtaagctatttatcggtatttcttcactcgataatttagttaagggcggacgaattagtcgtgtagctggagttatttccagtgtattaaatatgcgagtagtgatggagctggaagatggcgaattgttgccgattacgaaggggcgcggcaaaaagacatttagcaaatggtttgcggcttttaaagatgagttagcaaaagttaatgtgaaacaaatcgggatatcttacgctggaaagctcgattttattgacgaggctaagcaagctttacaagagatgttcccggatatgcatattccagttctgcacacaaacccaatcgtggctacccatacgggacctggtgcttttgctatcatgtattatacagattagatgtccctgcctctagagatagaggcgctttttttaccaaagagaacctttctaatcaaaggtaatctataacgagctatgaatcagaagaaggagcagatgaatgaaacgattttcaatactactgattccattggtagcagcagttgctactttgactattctttttttaactattcctaaagccgagtcgcgaatccgcgtagttcgagatgaaagtcagaactataagaaatctgttcacttcgttgcagtaggtgattcactgactgaaggagtaggcgatgagacaaaacgcggtggatatgtacctttagtgaccgatgcgctgcaacaaaaatatgaattgacttcggttgaaaaagacaactatggtgtttcgggcgaacgcagtgatcagattttaaaacgtgtaaaaaaggattcagacttacgaagcagtcttgccagtgcggatctaatcaccatgaccgttggcgggaacgatcttttccaagcctttcaaaaaaatctcaccgcaaaaacagctaagcagttcaatcgtccaatcaaaaaatacggcgagtatgtgaccgatattttagctgaaatgcgagagcttaatccgaaggctccaatttatgtcgtaggaatctacaatccttattacttgaatttcccagatatcaaggcgatgcagacggttgtagacaattggaataaagagaccgagcgattgaccaaggaaatgtcgaattgcttctttgttcccgtcaatgatctgctttataaaggaatcgccacgaaagatagtgctgagacatcgacaagttctacctcagaagtgaagaatgatgcactatacgacgaagataacttccatccgaataatttaggctaccagttgatggcgacagcgattcaagagaaaatcgtcgatacgaaggatttatggttaacaaaggagcgtaattaatgacagaaaaggaagaaaacaaagaaatcgaagaacataaagatactaagaaaaaggcagaaacaagaacaacgaaaaccgttcataacaaaatcaacggttggaaaatcgcgtttctcgtattggtaggcatcttattaggcggaattattttctctaccgtccgtatatttacagccagagaaacaaacttgccacctagcagtgaaacaacggtaccaaagggttcaccagttttgacgatgaacacaaataaaaagaaattaaacaccgtaatggaatactttttgaatgatttgcaaaaaggttcggatgtgaaatatgagttctacttggaaaatcaagcaatgctaaagggcgaattcaaaatattaggtgcaaatgttgatttttatctttactttgatccgtttgttatggataatggcaatattcaattaaaagcgcgagatttatccattggttctttaaacttgccagttagtcaagtaatggcaacagtaaaacgcggctataaattccctaaatgggtagcaattgatcctaaagatcaaacgattgtgttgaagttaaacgagttcaaactagaaaatggcatgtttattaaagcgaaccacattgatcttgttggtgatgacattcaatttagtctgtatttaccaaaagaaaagaaagccaatgattaatcaataaaacgtacaacaatcatcgaggtgaatcaattgagaagaagcttttatcattatatcttgacccaacgtggacataatccccatgattcagtcgaggcatttgctggagcagtcgctaaggacattatgtttcctaagcaatcggaggattatcacgaggttgctgattatctagaattgagtgtcgattatttagactcgatggatctgtttgatcaagtttgggataaatacttagaaaataataaataattcaaaaggaaaagttgttgaaggcttttccttttttttctagcatgctatcatgaaaaaaagggtgaaaggaaaatgcgccttgcagaaaaaaacgttaccagtatcgatttttgtcgtatcgatcatatgtactatcgtgattactgcggtagtgactcattttattgaacaaaaacaagcaatggataatgattcagtcgttaaaataactcgtaatgatttggatgacgttcaagacttgtatgatttaatcagtacaaattatgttgaaaaagtagacaaagaacagttgattcaaggtgctttgagaggtatgacggagtccttgcaagaccctgaatcagaatttctaaccgcaaaggaaaccaaagaattgaatgcgaaagtggccggaagttttgaaggcatcggagcaaatctacagttagaaaaccggctgcccgtgattgatcgagtgcctgtgaaaaattctcccgctgaaaatgctaaattgaaagccaaagatattattttggaagtaaacggcaaaacaactaaggataaatcactagatcaaattgtaagtatgattcgaggtaaaaaaggtacacaggtaaaattactgattcaacgaggtagtgaacaatttgaggtatcgctggaacgagatgttgttcctgaagatacagtgaagggcaatgttgataaagataatccgacggttggctcaattcaaatcgataattttcgtgaaacaacggcattagaatttcgcacgattattgaacagctccgtaaagacggcgcgaaatcatttgtaatcgatcttcgtcaaaattctggggggctaatcgctgaggcagaacgggttgccagttattttttagacaacggtgatacaattgctcagttttcgaacaataaaaaggtgatatcaattgacaaagcgggtaaaaaaattgatcagggcttcaaagtgaaagaacccactgtttttctagtagatcaagagagttcatatggtgcagaattagtagcagcggcagttaagaataaaaattatccgattatcggtgtgaatacttttggaaaaggcagtgttcaaacactcagtccaatcggtaaagataatttcgttcagctgacgattatgaaatggtttgctccagacggttcttctgttgaaggaaagggtgtgtcaccgacgattgaagccgattatcctgaatacgccaagttgccacctatctccaagcaatcaaattggcgtattggcgatacagacgatacgatcaaaaatctcaataccatgctaaaagctttaggttatcctacagaaggagatttgttcaatgaagcaacgaaggatgcagtaatagaaattcagacggaaaacaatttgtctgcaactggggcattggatgataaaacagttgatgctattcaagaaaaggtatttgcgcttgtcaaatccaatgatgttgcttatgctaaagctatagaaacgttaaaaaataactaacagattcattctgttggttttgattgcgaggggaaaagcaattgaaaaatttagttacaaaatcacatctatggttaggtgttaaatatctcttgatttccctcttttttggtgtagttattcgtggattcctcttgattcctgttcctgtaactggtaattcgatggatcaaacattatcacagggtgatatgattctgatggagaaattcagtaaggtcaaacgatttgatgtgattgtgtttcaacaggcagatggaacgatctacatcaagcgagtgattggactgcctggagatgatatccgctatgaaaaagatcagctttatatcaatggtgaaaagatcgctgagtcgtttttgacgaacaaccgtagtcatgatcaccaggtttctccttatacaacagatttcaaattggatgaattgattggggaaaagaagttacctaaagatgagtattttgttttaggagacaatcgaaggatttcaaaggatagtcgttcatttggcacagttcaaagtaaagatattttaggcaaagcccaagcagtctattatccactaacccatattaagattatttcgtaaaagatggagaaatccatcttttttttcaagcctcagcgtgattagaaagatgatatgcgtgacgagaataaattcttttatcatttttcgaagcatcctttgcaaatcctgattcaaaaaaattgagaaaagttctcattttattcaattgaagtaaaatttttattgagttactcttgagataggaagtcgactcctaattgaagatgaaggagaaaatgtatgtatcatgcaagattcaatggaacacattatgcaattggaaaaaaatggggaatgctgctcagtaaaaatggtaagcaattgttagacaacataccttttgatattacaaaagaaatgaaggaatttgcacagcaatgctatcctgtgtatgaggaatattatccagagatcattgatgaaatcaaaggcattgcggatggtcaaaagattaaaccagattctctgtatgctattctcttttcgatgtatgcacttgtcaaagttacgaattgctcaagcttcgtcattaagaatgagcagtcctttttactcggccgcaatagtgactttttgacagaaattgaaaaattatatatgaattgtttgtattcttttaaaatgtctgattcctatgcattttcgggtaacacgacggcctttgtggagatggaagacggtgtgaatcaagcaggtcttaccatcgccttgacttccgtgtttccagatcagttaaagccaggaatcaatgttggaatgattttgcgcatgttgttggaaaaatgtaaaacagtcaaagaagcgcttgagcttttgaaaaggattcctcgttgttcagctggaacgttagtaattgccgatctttctggagacgcctgtttggttgaatttacaaatgataaattagttcattctactttggaaaatgaaggattcctttgtgcaacgaatagttttcatttgccagagctgctctcaagaaaaataaaccttgtcgatgattggtttgcggaagaacgatatcaaacgttgatggactatttatcttctaatttccaacatatggatttgtctgaggcaaagaaattattagcaggtgagtttggctttttatgtcaatacgatcggaagacgggcaaagatactgtttggtcagcaatttatgatttaagcaataaacgggtttatcgttgcgaaggcaatcctaatcggaaaaaatttcaagaagatatgaggtttgatttttgattgaggactattttttctttttgtaatggtatacaatcacttatctgattggtgtcactaaaatatttttgaatcaattataaacaggagcaagcacattcatcaattaaaattattagaagccagctactggctttatataacttaaaaaaagaaaaaagaaaaaagcactcaagtctgagagtttttttcttttctttttgaattatttcattgattctataaaaaaagtggatggttaaatgtgcatataaaatagaatcttgttattttataaagcgccaatttcccttgcgctgaatgctcttgattatgattgttcaagtaagtgttgctctttgtgagtaagttattataggaggaaaataaaattggcagaataggtgcatgcaataggattcaaatgatcagcagatcggctaacaaaagatttactgcatgaaactttcgactagacatgaatactttcgagaagaagtatcaaattttcatgtcattaaaaacatgtggctaacgctgagaaaaaataattactgcttttttacacgactagtcgcaaataaaaaaccactgaacaaagtcagtggggagggtgtatcaaatgaaggtcttcagtttcattgttaagaaaagctgagagtagagatcaaatggatgcatacaccctccataaatcattttaacacattataatcaaaaaataacttattctaacttaccaaatttcttgagtagtttcttttgaactatataccggttatatattttatgttgttttttgaaaatgtctttaattatttatttaaatcatcattaaaataattaaactgattaaaagaaaatagaaaaatgactataataatctggatgctttagctagaaatatgagtaaatttaaagaggtgacaatgaagtgaaaataaagctattcatttagttaggcgtgtgtaattgatatttaagctgagttataatttcaatctttagtggactgtaagaaatgaaacccttataatatcaacggatagatattaagtaagaggcattcgttcagagaaaatttataaaaaattactctgttgagcctatatctaaagaacgcctaacgactcctaaagggaaagttgataggctgaggaggaaatatcaacatgacgattcaatggttcccagggcatatggcgaaggcacgtcgagaagtttctgaaaaattaaagtttgtagatattgtttttgaactgattgatgcgcgtttgcctttatcctcacgcaatccgatgctggatcaaattgtacagcaaaaaccgcggttgattttattgaacaaagcagatttagctgatccagctcaaactactttatgggtaaattatttccgtgagcaaggtcatcacgtattggcgttaacagctaagaatgataaaagtgtgaagcaaattgttcctgctagtaaaaaagtattggcggaaaaaatggctcgcgataaagaaagagggttaaaatcacgtgcgattcgggcgatggtgcttggcattccgaatgttggaaaatcaacattgctaaatcatttagcaggaaaaaaaatcgctagtactggtaaccgtccaggcgtcactaaagggcagcaatggctgcgttttggttcgcaattagaattattagatactccaggaattttgtggcctaaatttgaagatccagcagttggtaaaaagttagcgctaactggagcgattaaggatgatcttttgcatttagatgatttggcactttatctgttagaagtttttcgccgcttctatccattgcaattaaaagaacgttataaattaacagaagacgacttatttatggagttgcctgagttattattgctgatatcagaaaaacgaggtttcaaagatgattatgaacgtgccagtgagatgctgattcttgaattgcgacaaggaaaattgggccgtttcaccttggatcgctacgaggagttgagtgtttaatggaaaaattatcaattagtgcaattaaagcagagttaaaaacaatcatttcagcagatgatcatcgtttggcagaatttcgtcaggatacacgtaaaggtgtccaattggcaataagccaatggcaaaggcagcaggacaagcaagttgcattagcggaaaaatatcgagaaatgtcgatttttgaaaatgaaaagaaatcacaaggttttcaggcaatttgcggcattgatgaagttggtcgcggacctctggctggtccagttgtagcggcagccgtgatactgaatgatgagcatgaaattttaggtttgaatgattcgaaacaactttcggcgcataaacgggaagagctggtaaaggaaattaagaagaacgctcgggctatcggcattggagaagcaacggccgaagaaattgatcagttgaatatttatcaggcgacgaaagttgcaatgcaaagagcaattgatcaactacaaattacaccagactgtttattgattgatgcaatggttttagataatgggttaccccaggagaaaattatcaaaggagatgccagatcggtttcgattgcggctgccagtatcatcgcaaaggtctatcgtgatgagtggatggctgaatacggcgaaaggtatccggcttatggttttgctaaaaatgctggatatggaactagagaacatctacaagcaattgaagaacaaggtattttaccgatacatcgcaaaacatttgcaccaattaaaaatttatactaaagaaaatccttcttttttttgtatctttttgataaagaaactgaaaagagggatttttttgaagaacgaatttttgttacgattgagtttagtcggctcttcgtcaaatcgtgttggtgaagacaaatttgaataaaacttagtccgatatgcgacgcgttctgtgcgccgcatattttttagttttcaaagatcagaccttgttgtaaatagatccgtgcccgaaagttataaaagttgcgataaccaaacgcaattcgtttaatcagcttgatcttgttattcagcccctccgtgacgccgtttgagtgggacaccttaaaggcatttgaaatacccgattggtagcgatggaagatcgtgaatttctttttaaacgactgaggtaacgtagatgaaattgttttaagggtttcttgaaagccttccgtatctcgtttaacgaaataatagcgtaataattgacaaaaatgatacgctgttcgcaattcttcgttgtagcttaacagttcatcgacgatttctgtttgactaattggtcgtttaaacagtcgatgataatgccgtttgagtggctccaatgtcgtggaatctttgagtaagagtttccaatatcgcttgagccgacggtacttcttctgattttcagagtgtgaggttcgaaaacgattcatgatctggacacgtaattgattgaagctgcgattgatgtgttggacaatatgaaagcggtcagttacgatctccgcatttggaaagaccgttttaagcaactgacaatagctggcattcatgtccatcactaggtacttgacctttaaacgggcctttctaggaaagcgcaggaagtattgagttagtttgtaaagtctgcgatcttcaaggatcgtaaatagctgattggttgtcccatcaacacaaataaaactcatggaaccagaaacagacttcattgatttgaactcatccatacacaacaccgtcggaaggaagttcatacgtggctggtaatgcttcgttgcttcacgcaagatccgtgtcaccgtcccatccgagacgaagtacttcttagcgattagtttacgtgattgattttcgtacagttccatgagaatcgcctgcttcagttcctttgttagttgatgatgttcatcaactaagtccgttttcgcagaaaaggtccgtccacaatcatggcagagaaaacgggtacgttttaattctaaaatagttaacttttctttgactttcaacatctgagtgcgtgtcgtataggaaccgttgcggataatacgaaccgatcgacagtgttcacaacaggaaggagagtcatccaattttcctttaataaactgcgcttgaacgcctttatattctttttcaatcagccattcttcatcaaaaaataaatgtttatctgttaatccgagtaattttctagtatgattatccattgagagactcctttggtagggtgacgttttggtcaactaaattttaccaaaagtgagtctctttttgagttgaaacgaagaaaaaagtgttagtagaaaatcgccttcgattttcaaccaacacaaaatattatagaaccgtttagtcaagggagtaggggcttttggaaaacagcggatttatcagtttgcgaaaaagcatcaatggtgggagttgaatggattagacattaggcttacggctcagacaacgaagaaaaatgattgggatgaatggacgaaggaacggcttcaagaaattgaaagcacgcaccaatatatcacgattgaagatcaggcttatccagaaacattgcgacaggtttcaacgccaccattggtcttgttttacaaaggaaatttagcattactagaaagagaaaagctggcgattgttggtgctagagaagcgacggaatacgggtatcatgtcctgcagaaaataatgcctgagcttacgaaacgcggttttgtgattgtcagcggtttggctaaaggaattgacagctttgctcatcaattttctatcagcaatcaggggaaaaccattggtgtagtaggcacaggtctagatatttgttatcctaaatctagtggcaatttacaaattgaaatgagtcagcatcatttagttttaagtgaatatcctaatggtacgaagcctgcgaagtttcattttccaatgcgcaatcgcatcatcgccggattaagcagtggtgtgcttgtggtagaagcaaagagacgcagtggttcgttaattactgctcaacaggcgttggattatggcaaagatgtttttgcggttcctggatcgattttggatgagcgttccagtggctgtcatcagttgattcaagacggtgcaatctgtgttgaaaaaacacaagatatttttgattcctacgatttatggaataaaattcattagccgcgacttgacaaacaaaatttgaatagcgtattataggctacgatttgtcagtagttaccgatatataatagtagaaaaaattgaggaggcaaaaacatttggcctataaatacctagttatcgtggaatcaccagcaaaagcaaagacgatcgaaaaatatttgggaagaaactataaggtcgtagcaagtgttggacatgtgcgggacttacccaaaagtaagatggggattgatgtggaaaataattatgaaccccactatatttctattcgaggcaagggcgatgttatcaaaagtttgaaacaagcggctaaaaaagcgcaaaaagtttatcttgcaagtgacccggatagagaaggagaagctatcgcgtggcatctctcttatttattaggattggacttaaaggataagaatcgtgttgtattcaatgaaattaccaaggatgcagtaaaggcagcctttaaagaacctcgttccatagatgtttcgctagtagatgcacagcaagcacgtcgggcattggatcgccttgttggttactccatttcaccgattttatggaaaaaaatcaaaaaaggtttgagcgctggtcgtgttcagtcgatcgccttaaaaatgattattgatcgtgaacaagaaattcgtgattttgtgccagaagaatactggagcattgatggaaacttcaagaagaaaaccaagaagttcaaagcgaatttctggggtgtcgatggcaagaagaaaaaattgccaaatgccgaagcagtgaaggaagttacagctagaattgacggcaaggactttgaagtgactaaagttgagaaaaaggaacgcaaaagaaatccggcattgccatttaccacgagtaatatgcaacaggaatctgctcgtaagttgaacttccgtactagaaaaaccatgatggtagcacagcaattgtatgaagggatcgctcttgggaaacaaggcacagttggtctgattacctatatgcgtacagattcgactcggatctcggatacagcaaaagctgaagcagctgagttcattgaagaaaaatatggtaaagagtattcgcagcatcatgcccgtaaagcgaaaaatcctcaaggggctcaagacgctcatgaggcaatccgtccgacaagtgtacgacggacacctgaagaaatgaagcaatatttagacaaggatcaattaaagttatacaccttaatttggtcacgctttgttgctagccaaatgactgcagcgattcttgatacgatgaaagtgacattggaacaaaacggcgtcatctttatcgccaacgggtcgaaaatcaagttcaaaggattcatgcaggtatatattgaaggccgtgatgacggaaaagaagacaaagaaaatattttacctgaacttgaaaagggcgaagttgttcaatctgttaatattgaaaataaacagcacttcactcagccgcctgcacgatttagtgaagcaacactgatcaaaacattggaagaaaacggagttggtcgtccgtcaacttatgcgccaaccttagatacaatccaacgtcgttattatgtgaaattaacgcaacggcgttttgaaccaacagagcttggcgagattgtcaataatctgatcgttgatttcttcccgcaaatcgtggacgtcaactttacagcagaaatggaaaacgatttggataaggtggaagaaggcaaggaagaatggacaaccgttgtggaccgtttctataaaccttttgctattgaactggaaaaagctgaagaaggtattgaaaaaattcagatcaaagacgagccagcggggttcgattgcgatgtctgtggacatccaatggtgatcaaattgggacgttatgggaaattttatgcctgtagcaactttccggattgtcgcaacactaaaccaatcatcaaagaaatcggtgttgaatgccctgtttgtcacaagggacaagtggttgaacggaaatccaagaagaatcgcttgttctacggatgttcacggtacccagactgtgactttacttcttgggataaaccaattggccggacatgtccgaaagacggcggttatctagttgagaagaaagtcaaaggcgggaaacaggttgtctgtgtgaatggtgattacgaagaaaaagtacaaaaataagtgatactaagtgaggattaaatggtaaaaacagtgaatgttatcggagcgggtcttgctggaagcgaagccgcttggcagttagcagaagcaggggttccagtgaatttatatgagatgcgcccggtgaaatcaacagcagcacaccacacggctgattttgcggagcttgtgtgcagcaactccttacgaggaaatggattgacgaatgcggtgggtgttctgaaggaagaaatgcgtcgcttgaattctttagtcatcagctctgcggacgaaacggcggtaccagcgggtggtgcgcttgcagtggaccgaaatgatttttctggattgattacacagaagttgaaaactcatccattggtgaccgttatttcagaagaaattacaaaaattcctaaagggattaccatcatcgcgacaggtcctttgacctcagaagctttagcagaagaaatagcggaatataatggctctcatggtttttatttttatgatgcagcagcgcccatcatcgatagctccactattgatcgtgataaggtctatttgaagtctcgttatgacaagggagaagccgcatatctgaattgtccgatgactgaagaagagttcatgcgtttttatgaagcattaatcactgcggaggttgctccacaaaaagaatttgagaaagaaaaattttttgaaggctgtatgccgatcgaggttatggctaagcggggaatcaagacgatgttgtttggtccaatgaagccagtgggattagaagatccaaaaactggaaaacgtccgtatgctgtaattcaactacgtcaggataacgcagccgcatcaatgtacaatatagttggttttcaaacgcatttaaaatggggcgaacaaaaacgggtcttccagatgattcccggcctagagaatgctgaattcctgcgttatggagtgatgcatcgcaacagcttcatgaattcaccagagcttttaagacctacttatcaaagtaaaaagcgtgatgatttattctttgcgggtcaaatgacaggcgtggaaggatatgtcgaaagtgcgggtagcgggttagtcgctggtataaatgcggctcgattggcgaagggtgaagaattgatcgaatttcctcatgaaacggcgattggctcgatggcctattacattacccatgcagaaggcaaacatttccaaccaatgaatgcaaactttgggttatttcctagtcttccagaacgagttcgcgataaaaaattgcgctatgaaacacttgcagagcgtgctttgaacgctctcgctgaaatgaatatttagaaaaatttccgttgcttcggcaatgggatttttttattttgacaaaataaatcggattcatgtttgatttgaaggcaattatgaaatatctgtaaagaattgttagtatattcgtgaaaagtcaataaattctgacaattcaattgtaattaaaaagttcttatgctacatttgtgatatgtttgtgaggtgagaaaaagtttggaaaatgaagcagccatgcaagagtttatgggttatttaatgactgaacgcgggtactctgaaaagaccaaagaggcttatcaacgcgacttaaatgacttttgtcagttcttagaaaattcaggagagtcttcattattaacagtcgatcatttagacgtaagggtttatttgtcttacttaaatgatttaaaatacagccgcaacaccattagtcgtaagattgccagtttacgctctttttatcaataccttttaaagcatgaaaaaattaaagaaaatcctttttcttacgtgcatctcaaaaagaaacacgctcgtttgccacgctttttttacgaaaaggaaattgaagtattatttgctaatgtggacggtacgaaaccgttggaccaacggaaccgtgccttgttagaagtactttacggatctgggcttcgggttagtgaatgtgcaaatctcaaattatcagttatcgactttgataacagtgttctgttgattcatggaaaagggaataaagatcgttatgtgccattaggttcttacgcagcggatgcgatccaggaatttgtgggtgatggacgtaaaaggctaatgacacgttttggcaaggagcatgactatttattcgtaaaccaccgtggagaacagattacttcaactgggattgagtatgtactgaagcaaatcattaaaaagagcagtttaaatagtgatattcatccacacatgcttcgacacacctttgcaacacatttactgaataatggcgcagatttgcgtacagttcaggaactactaggacatgcgaatttgtctacaacacaaatctatacgcatgtgaccaaagaaagtctacaaaaaagttatcgctcatttcatccaagagcttagaggacagtttaaaataaaggagagaaaaagatgtcagaatcacaatttcattcaactacgatctgtgcgattgaaaaagacggaaaattagcaatggctggtgacggtcaagtgaccatgggagagcaagttattatgaaggggactgcgcgtaaagttcgtcgtatctataacggcaaagtcgttgtcggatttgccggcagtgtggctgacgcatttaccttagaagaaaaatttgaaggcaagctaaatgaatataatggtaatttgcaacgggcagccgtcgaacttgcacaggaatggcggacacagcaagcaatgaaaaacctagaggcattattgattgtcatgaatgatgaagaaatgctgctggtttccggaaacggcgaagtaatcgctcctgatgatggcattttggctatcggttcaggtggaaattatgcattggccgcagcgcgtgctatgaaaaaacacaatacagaaatgtctgctaaagaaatcgcagaaagcgcattgaatattgcagcagatatttgtgtctttacgaaccataatattattgttgaggaaatgtagactgatttaatttcaaaacaatcaatttaggagcaaggagaatccagatgactgaagttaataaaacaccaaaagaaatcgtcagcgagttagatcaatacatcattggacaagatgaagcaaaacgctctgtagcgattgctttaaggaatcgttatcgccgaatgcagttagaagaaacgatgcagcaggaagtaacacccaaaaatattttaatgatcggacctacaggtgtagggaaaacggagattgctcgacgtttggcgcgaatcgtcaaggcgcctttcgttaaagtcgaagcaactaaattcacggaagtaggctatgttggtcgtgacgttgagtcaatggttcgtgaccttgtcgaaaatgcgattacgatcgttgaaaaggaacaatactcaaaagtgtattcacaagccttaaaacgtgctaataaacgcttagtgaagattttagttcctggcattaagaaagagcaaaaacaaagtaataacccttatgaacaaatgatgaatatcttcaaccaaacacaaaccgaaccaaaagaagaagtaactgaggatatcaaggtaaatcgtcaaacagttcttgatcagttggaaaaaggtctattggatcagcgagaagtaagcattgagatcactgaaccgaaaaaaacgatgccgatgaacaatgggctagaacaaatgggtatcgacctttcagacacattaggcgcgttaactcctgagaaaaaggttcaacgcacagtgactgtcaaagaagcccaagagctattagttaaagaggaacaggccaaactggttaatgaaggtgatatttatacagcagcgatcaagttagcagaaagctcggggattatcttcattgatgaaatcgataagatcacatctaaatcacagcaaaattccggggaagtctctcgtgaaggcgtccaacgtgatattctgccaatcgtagaaggttcacaggtcaatacgaaatacggcgcgattcaaacggatcatattttgtttatcgctagtggtgcgtttagtttgtctaaaccgagtgatctgattcccgaactgcagggacgcttcccaatccgtgtagagttaagcgatcttacagcggaagatttcgttcgaatcttgactgaaccaaataatgcgttgattaagcaatatatcgctttagtcggcaccgaaaatgtcaaaattattttcacgcaagaagccattgaacgaattgctcaaattgcctttgatgtgaatcgggagacagacaatattggggcacggcgtttgcacacgatcttggaaaaattattagaagatcttttatttgaagcgccagacatgcaaatgggtgagataaagattacagaagcatatgtggatgaaaaattagcttcaattgctcaaaataaagatttaagtcgttttattctgtaaaaatggaggggaaaaagtggaaacattattagagaaaacacgtcagattaataagttgatgcagcaaaaaaatgccttcgaaccagctgcagagttaccttacaacaatatggcgcggattttaggggacgtcttaggctctttgacgtacatcattggagccgaaggtgaattgttgggattaaatgaaaagatcgatatcaatactgatcgcgtccgttcatttctggttgaccgtcaatttccagatagctatgtttcaggaatgaaggaagtttttaaaacggaggccaacataccagttgcaaacgagttgacggcctttccaactgagcgggcggaactttacccaaatggattgacgacggtcattccaatttttggttcaggcgaacgtttaggaacgatcatcttagcacggacagaaggagcttttgatgacgatgatctggtattagctgaatatggtgccacagttattggaatggaagtcctttatcagcaattcttgaatgtcgaggagaagatccgcagtcaaacggcggttcaaatggcgatcagtacactttcgtatagtgaattaaaagcagttaaagcgatttttgatgcattggagggcgatgaaggccgcttaaccgcttcaaatatagccgataaaatcggtattacgcgttcagtgatcgttaatgcgttgcgaaaattagagtctgctggaattattgaatctcgttcgctaggtatgaaagggacgtatctgaaggttttaaatccattattcaaggatgaactggttcgtcataaataggtttaatctcataatacgcagattccttttttataaaaggagtctgcgttacactattggagatacatgacgtggaaagcaaatcttttctacaagaaaactatgcgttagcagggacaaggagtggggaattatgtcagtaacaatcagcaatggctttttggaagcaacgatcaatgaaaaaggggcggagctggctagtttgtgcgccaatcagattgagtacatttggcaggcagatccaaagtattggaaccgtcatgcaccgttcttatttccgttcgtcggccgtttaaaggataatcaatatacctataaaggtaaaacttatccgatggggcaacatggatttgctcgagataaggagtttaaagtacttgagcaagcagaggataaagtttccttcttacttgaaagtgatgaagaaacgaaaaaaatttatccatttgattttgctttattgatcagctatgaaatttggggagaaggaattcgtattcgtttcaatgttgagaatacgggtaccgaagagatgatctttgcactaggaggacatcccgccttcaatattcctctgacagaggatttaagttttgaagattattttattgcattttctccacaaaaatcacgagttaaaattcctttagagggtccatttgccaatttggatcaaaaaaccattggacaaaccaatacgaatattcaattgagtcacgatttgttcagagaagatgccttaatctatgaaacaaagggattgaacgcatatactttagggagtgaagaatcacctcacagtgtcacgttagcctacaataatattccttatgtcggattatggtctccgtatcctgctgaagcaccatttgtttgcattgaaccatggtggggttttgctgatacagtcgacagcaatggacagttggaagacaaagaagggatgaatcgcttggctgcgaaagaaaccttcaaaaccgagttttcaattactgttagttagaaaaaaaagtcgagaaatactagagctatctaaaacgatagattagtatttcggttctataatatttggtgttgttactctttctgagtgagaacaccaagtatttttttatacaaaaagacatttggttgtcctataattaaatcgctgaacccaatcataggaggcgaaccaaatgtccagtattaagaatatcaaatataaagataattgcctagacaaaaccatcaaacaaatcctaaatattcatgattccaacattacttttcctaaagacgccgtttcaaaagaaaaagtccatgacagaatggccaccgtctttactggtcgactgagctatccgtctcctcggtgtgagtgttgcggctacgactccgtcatccatcatggctacaaagatagctggattcaattactcccttatcaagaggtgtctacctatcttcatctctataaacaacggttttattgtaaacagtgtcaccataccttttcagctaaaacctattatgtcgcagaaaactgttatctctcccaagcgctcaagtttgcgatcgctgttgatttaaagaagaaaatttcgatgaaagatatcgctcaacgttacttggtttccgctaaaacggtcgaacgggtcttggattctttttttgaagaaccacgactgaagcccaattacttacccaaacatctcttgattgatgaattcaaaggaactaaggactgtcagggcgccatgtgttttattctcagtgacgcggatacggggaaaatctttgatattttagaggatcgaagaagcttcaagctgatcgcctatttcatgcgctttacttatcacgcacggaaacacgtttctcatgtcgtgatggatatgaatgcgggctatgattctgtgacaaaggtcgttttcccaaatgctcggatctctattgatcggttccatgtaatccaacaactcaatcgtgcgtttaacaaacaacggataaaaaccatgaatcacttgaaaaagagcgacccgcaagccatgaaaaagtatcgcaagcttaagaaatattggcgaaccattctgaagaaaaatagaaaaatcaattattcttcgctcaaacaatacccgcttttccaacggaaatacctgacggaatcggaagtattggactatttattattgattgacgagcacttacggacaagctatgatgtgtatcaaaatttgttggatgcctttgatgccaaagattatacagacttttacgaacgcattgatcacttacctccgatgcttgatccagcatttaaaaaagcgattctttacttaaacaaacacaaacaagcgattatcaatgcgttaaaatacccctattcgaacggaaaacttgaagggaagaataacttgattaaagtgattaagagagtggcattcggttttagaacctttcgccaccttcgtatgcgaattctgattcaacagaatctttgcgacattatttgagcaaaaaaacaaaaagaaaaaaggaaacgccgaagcatttcctttcagtgatttaatgaaaacaacacgatttgacttagagccagtatttctcgatttttttatactgaaattatggttaatcaaatggcacatgccaatcatttgctttgtgagcatcaaagcatagtttgatttgttcttgactattctttgcttttgctaaaggcggtaagttatccgcagaaaaccaatcaatttgaagcgtttcgatattcttaacgaagtctccactgatcaattggcattcaacgaaaatcttacagacaccataggcataacgaggaagattgtgcttgtttcgatcttgaacagcaatgatttttaatggttccactgtcaggcctgtttcttctatagtttccttaacggtattttctttgatcgattggttaatatcaacccatccgcctggtaaggaccaaagcccatcattttcctgcactaataaaatgcaattatctttgaaaattgctgctcttgtatccaacttaggtgttggatagcctacttcttcagcgaagagttgccttaattttggaacagggatcggagagtgtacagacagcatctccgtggcgatggttcgaatccgttcaaatcgctcttgatcaaagggatcatgtgtataggttaggccagcttgagcaagggcctgcaattcaattgcccaatctaaaagttgttcctccatttatttcaccttcttgttcaagccgaaggatacacgattttcatttccagccttgattcgttgaatattttctctgtggcgataaacaatatagcaggtcaaggcaaaacaaatgacggttagcaaaagattaaatgtcggtaaaattgtcggccaaataaatggcaatatgatcgatgagagtgtgacaaaaattgcggaggcaatgctggcggcactaaccatacttgtaatataaaggacgattaaaaagaaagtcaatgaatagaaaaagaataagggcgcgaaggctagtagcatcccagcactagttgctacggcttttccgcctttaaatccagcaaaaattggtaaagtatgtccaactacagctaccaaaccaaaccataagggattgatatccacatgaaaaagagtgggaagaagtgttgcgagtgagccctttaataaatccatcgcaaagacgacaaacccagctggctttcctaacactcgaaaggtattagtagtcccagaactatgactaccaaactcacgtatgtcttttttgaagaaaaattttccaatccagatgccggaaggaattgagcctaaaagataagctaggacaaaaattatggcggttttcatatgaatcctcatttctctattagtaaggctattttagcagatttcaaaagagtgaacaaatcttaatcccgtgctatactaaatagtgtgaatagttaaaaatcaaattgagcgaggaaaatcaaatgagttttaaaaatcctaatcaagaaaaaatttttcagtatttggacgaagcaaaggttattgctgtagtgggtttaagtgataatcctgataagacaagctatcaaattgctgacgtactaaaaaattacggctacaagctgtatggtgttaatccaaagttagctggacaaaaggtgaacgatattccagtcgttgaaaatttatcggctgttccagaaacgattgatatcgtggatatctttagacgtagcgaatttttgccagcagttgcagaagattttttaaaaaccgatgcaaaagttttttgggcacagcttggcttatgcagtgaagaagcagcagaaatgctgcaggcacaaggacgcaacgacattgtgatggatcgttgtgtgaagattgaattgaacaaaaaatctaatgattgagttgattttcttaaaaaaaaagcataaaatgccttttcagaaacaggagaggctttttttttgagcttttttagcgtatcatacaaatgatgtacttaagatatagagatatcaattcagctatggttcaatgatctacgcgctggaggagatagagtatatggtacgaacaaaaaacttcatcggaaaatgattacgcaattggagtaaggatatcatttcaactttgccaattcttcttgccatagcaataatagaaagtgcgtactttagttgaatgatagacgccattcgaatcagattaatttttcttggaaaattaatacattaaaacaaataaggatgtcagttcaacttttcgcaggatgtttcatcagaaaaatacttaacaagatcggttagattgatgtacaagtattttagttgaatgatatgcggcatttgaatcaaactaatttttcttgaaaaattaatacatcaaaacaaataaggagctgtaggattggctaagatgaacaacgaatacaatgacgcttcgatccaggtacttgagggattagaagcggttagaaaacgaccagggatgtacattggctcaacagacagtcgtggattgcatcacttggtctatgagatcgtcgataatgcggtcgatgaagccttatctggctacggaaatgaaatagaagtaacccttcatccagataatagtgttgaggtaagcgacaaaggtcgcggtatgcctgttggaatgcacgcttcaggaattcctactgttgaagtaatctttacgattcttcacgccggaggaaaattcggtcaaggcggttataaaacttctggaggactacatggtgtaggggctagtgtcgtaaacgctctttcagaatggttaaacgttacaattgttcgcgatggtgtagaataccgcgaagagttcaaagatgggggtaaacctcaaggaacgttagaaaaaattgggaaaacacgtaaacctaacggtacaaccgtccattttcttccagatgcacaaattttttcaacgttgaatttttcttatgaaactttgtcagagcgattaagagaatcagctttcttactgcgaggggttaaaatcactttaatggatctacgtggtgaagagaaagtttcagaagtttttcattttgaagaaggaatcaaagaatttgttgagtatttgaatgaagacaaggatacattgactcctgtcgtgtatttttcaggggatcgtgaagggatcgaagtcgaattctcatatcagtacaatgatggctattctgaaaacttactctcgtttgttaacaacgtccggacaaaagacggcggtacacatgaatcaggtatgaaaacttcaatgacaaaagctttcaatgaatacgcgcgaaaagccggcttgctgaaggaaaaggacaagaacttagaaggttctgatttccgtgaaggtctatctgcggtgttatccgttcggattccagaaaacttgctgcaatttgaaggtcaaactaaagaaaaattaggaacaccagctgctcgtggagctgtagataatgtcatcggcgaacaaatgggcttttatttacaagaaaacagcgaaaacagtcagatgctggttcgaaaagcgataaaggctcgtgaagcaagagaagcagcgcggaaggcccgtgaagaaagccggaacggtaagaaacgtaaaaaaggggaatctctactttctgggaaactaacacctgcacaatctaaaaatgctgcgaaaaatgagttgttcttagtcgaaggagattctgccggtggctcagccaaacaaggccgtgaccgaaaatttcaagcaatcttacctttgcgcgggaaagtaatcaatacggaaaaagctaagatgcaagatattttgaaaaacgaagaaatcaataccatgatttacactattggatcaggtgttggaccagagttttcaattgaggattgtaactacgacaaagtcatcattatgaccgatgctgacacggacggtgcacacattcaagtcttgttattaacattcttctatcgatatatgaagccattgattgaagcgggaaaagtctatattgctttgccacctttgtataaagtttcaaaaggcgctggacggaaacaagtgattgaatacgcttggacagatgatgaattacaagaagtgatcaaaaaagttggtaaaggttatatgttacagcgttacaaaggtctcggggaaatgaatgcggaacagttatgggaaacaaccatggatcctgagtacaggacgcttgttcgagtgcgcattgatgacgctgctcaagcagagcgtcgtgtaacgactttgatgggggataaagtggaaccgagacgtaaatggattgagagtcacgttcaattcaccttggaagaagacgggagtttgctggataacaaagaagaagcgactactgtgcctgtagctgaacaaaatgaaatggaagaaacaactgatggtgttaaaatgatcagtttgtttgatgagtaggaggtggtcaatagatggaatctaagcattcaattcaagaactaacactagaagaagtgatgggtgaccgttttggccgctattcaaaatatattattcaagaaagagcgttgccagatattcgcgatggtctgaagccggttcaacgtcgcattttatacgctatgaacaaagacggaaacacgtatgacaagggttttagaaaatcagcgaaatccgtcggaaacattatggggaattatcaccctcacggtgacagctcgatctatgaagcaatggtacggatgagtcaagattggaagcttcgtcaagtgctgatcgagatgcacggaaacaacggctcaatggatggtgatccgccagctgcgatgcgttataccgaagcacgtttgtctcaactaagcggtgagatgttgaaagatatcgaaaaggacactgttgatttagtttggaattttgatgataccgaaaaggaaccgactgttctgccagctgcttatcctaatctgctagttaacggttcaacagggatttcggcgggatatgctactgaaattccaactcataatttaacggaagtaatcgatggcacgatttatctgattgatcacccgaatgcttcgttagaaaaaatcatggagtacattccgggacccgattttccaacaggtggtattttacaaggtaaagcagaaatcaaaaaggcttatgagactggtaaggggaaagtgattcttcgttccaaaacctcgatcgaaccactaaaaggcggcaagcagcagatcgttattcatgagattccgtatgaagttaataaagccgttttggtgaagaaaatggacgagatccgtttgagtaaaaaaattgatggcatcgctgaagttcgtgatgagtctgaccgtacgggattacaagtagtcgtcgaattgaaaaaagatgccaatgcagaaggaatcttgaattacttattcaaaaatacggatttacagatcaattacaacttcaacatggtagccattgataacatgactccgcaacaggttggattgaaacacattttggaaagctacatccttcaccgcaaagacgtgatcactaaacggagccaatatgagctggcgaaggcacaaaaacgtcaacatattgttgaaggcttgattaaggcattatcaatccttgatgaagtgattacgacgattcgcggaagtaaagataaaaaggatgcgaaacataatttagttgaacggtttgattttagtgaagaacaagccgaggcaattgtaacgttgcaattgtatcgtttaaccaatactgatattactcaattagaaagtgaagcggatgaattagcggctgaaatcaaagagctgcatttaatccttaatagcgaaaaagaactacacaaggttttaaagcaagaattgcgtcaaatcaaaaaaaattatggcaatgaacgcttaacaacaattgaagatgaaatcagtgaaatcaaaatcgaaacagaagtattaatcgcacaagaagatgtaatcgtaacattaaccaaagagggttatttgaaacgcagcagtttacgttcgtataatgcatcgcgcccagatgaacatgggatgaaagatggcgattcgattatttttattaataagctgaacactttggatcacctgttgattttaacaaatcatggaaacatgatttatcgaccagttcacgaaattacagagctgaaatggaaagatgtcggagagcatatatcacagacgataaccaatctctctatgagtgaagaaatcattgcggccttcccatacaaggaaattgacgcgaacaaactcttcatcttcatgagtaaagaagggatgatcaagcaaacacgaatgactgagttttcgccatggcgtacgtatcgaagccgacctacaacggcgatgaagctaaaaaatgatacagacgaaattgtctcagtcttcttaacgaatgagactcgcaatgtcgatgtcttcattgcctcacatcgtgcctttggattacgctatccactagaagaagtaccagtagttggttcaaaagccgcaggtgttaaggcgattaatctaaaagacggggattacgtagtagcaggtgcgttagttccgtcagatggagattcacccatcttattgttgagccaacgcggggcagctaaacgtatgctcgctcaagaattaccgcaacttggtcgggcgaaacgcggattgatgattttccgtgagttgaagaaaaatccacatcgcttggcttatatgacagctgaaacagaaggaaagcttactttaacaacgacaaaaggtattgaaaaggaaatcgagatatctaaagttgcgattagtgatcgaatttctaatggaacttttgcgattgatgagaaacaagaaggagaacttttctctgttatgcagttgcaggaactcgacgaagaatagtttctgtattatataattatattacagttgggtatctgttttaatacagatgcccgtttttttgttcacaatttcatgtaaataagacgatgatgagaaattgttttaattaaattaatcccgataaatgctttaatttcaaagggttgctaacgattacaaaatatttttaacttctaattaatctttcacaaggaaaggcttgcataaaagaatttatgtgttatactttgttcgtaaagctgtagcaataaagtttttatattctaaggaggtccttttgaaatgggaactgcaacaaatgaactagatcaaatgaaaaacactgaaaaaactgcttgggaagggtttaacggtcgtttatggaaaagcgaaatcaacgttcgcgattttatccaaacgaactatacaccttatgaaggcgctgccgatttcttagctgagccaacggaagctaccaaccaactatggggcaaattacaagaacttcaaaaacaagaacgtgagaatggcggcgtattagacatggaagcagatgtcgtatctgcagccaatgcttatggtgctggttatatcgatgaaattttgaaggacgaagaagcaattgttggtattcaaacagacaaacctctgaaacgtgcattcatgccttatggtggtattcgcatggctgaagaatcacttgaaagatatggctatactccaaatcctaaatacactgaaatttttaacgattaccacaaaacacacaatcaagcggtattcgatgtttacacaccagaaattcgtgcggcacgtcgtgctaagattattactggacttcctgatacttatggtcgtggacgaattgttggtgactaccgtcgagtggctttatacggtatcgattacttaatgcaagaaaaattgaaagaccatgcgaattgtggtcatggtcaatttactgaagaagatattcgtcttcgtgaagaaattagcgatcaatacaaggcactgaaacgtattaaagaaatggctgctgcatatggattcgatatttctcgtccagcagaaaatgcgaaagaagctgttcaatggacatacttcggctacttagcagcaattaaagaacaaaacggtgcggctatgtctatcggacgtgtctctacgttcttagatatctacatccaacgtgacatcaataaagggattcttacagaagaaaaagcacaagaattgattgaccacttggtaatgaaattacgtatggtgaaattcgcgcgtattccttcatacaacgaattgttctcaggcgatcctgtttgggcaaccctatcaatcgctggtatgggtatggatggacgtactttagtaactaagaatgacttccgtttcttgcatacattggaaaacatgggaccatcaccagagccaaacttgactgtcttgtactcttctcgtttaccagaaggatttaaagactatgcagccaaaatttcaatcgatacttcatcaatccaatacgaaaatgacgatgtaatgcgtcctgtatggttagatgattatgcaatctgctgctgtgtatcagctacacagacaggaaaagaaatgcaattcttcggtgctcgtgcgaacttggcgaaagctttattgtacgcgatcaacggtggcgttgatgaaaaatctaaagcacaagtcggacctgacttccgtccaatcgaatctgacgatgcattagactttgatgaagtaatggctaaatacgatgaagtactagaatggttagctggaatgtatgttaatacattgaatgcgattcactacatgcacgacaaatattactatgaagctgctgaattagctttgatggatacaaacttgaagcgtacatttgcaacaggtatcgctggattctcacatgttgtggattcattagctgctatcaaatacgcaaaagtatttccaattcgtgacgaagacggtattgttactgacttcaagattgatggcgaattccctaaatatggtaatgacgacgctcgtgcggatgatttagctgtttgggtattgaaaacatttatggaaaaattagaacattaccatacttatcgtaattcagaaccaacaacgtcaattttaacaattacttcaaacgttgtttatggtaaagcaactggtacaatgcctgatggacgtaaagccggcgaaccgttggctccaggagcaaatccatcttacggtgcggaacaaaacgggctactagcatcattgaactcattgacaaaattaccttacgaatatgcattggatggtatttcaaatacacaaagtatcaacccagatgcattaggtcatgatgaagatgaacgtgttgaaaacttaacaaacgttttagatgggtacttcgatcaaggggcacatcacttaaacgtaaatgtgttcggcaaagaaaaattaattgatgcaatggaacatccagaaaaagaagaatatgcgaacttcacgattcgcgtttctggttatgctgttaaattcattgatttgactcgcgaacaacaagaagatgtcatcagccgtacattccacgcaaaaatgtaattgctgatttcaacaattgaatgtatagtaagggcggatggacggaaagtctattcgccttactttttaatatgaaggagctaagggttactcttcgcgtttctaatgcgtcagaggcatcctatgtgcgtgactaaagattaaatgttgcggcaaccatatcaaataacttaactagaagttaactgtgtattccacaggcatcttcagtatatagaagactttgaatagtgaaaatcaacactaaaaaaaattacatagattagagggggactgtttatgtctactgtggctgaacaacctattgtcggaaatatccattcaatcgaaagttttggatcagttgacggacctggtgtgcgttttatcgtctttatgcaaggctgtcggatgcgttgtcaattttgtcataatccagatacatggaaaatcaatgatccgaaagccaagaaacgaacagcggatgatttattaaaagaagccttgaactatcgcagttactggggaaaaaaaggcggaatcactgtgagcggcggagaaccattgctacaaattgattttttgattgatctgtttaaaaaagcgaaagcaatggggattaatacgactttagatagctgtgggaaaccctttacttttgaggaaccgtttttctctaagtttgaagaattaatgcaatatacagatttgattttgtttgatatcaaacaaattgataatcaaaaacataaggaattgactggtcataacaatgacaatatcctagagatggcgaaatacctttcagatattaataagcccgtttggattcgtcacgtacttgtcccgtttagaagtgattacgacgagtttctcattcgattagatacttttatcaaaagtttaaataacgtcgataaagttgaaattttaccttatcatacgatgggtaaatataaatgggaagaaatgggactgaagtatcctttagaaggtattgaaccaccaacggacgaccgcgtggaaaacgcgaagaaactgttgcacacagaggattataaaggctatttaaaacataaaaactagaaatcaaaagatcagaccaaaaaaggctctgatcttttttattatccaatgaaaataagcagcaggttgttgctcttttgcttttttttgatatgataaagaagaacttatttaaaggagcgattcaactatgggaaaagttttaatttttggacatcaaaatccagatacagatgcgatcggagcagcgattgcttatgcaaacttgcaaaaagaactaggtattgatgcggaagcagttgcactaggaacaccaaacgaagaaacgcaatttgctttggaacactttggtttgacagctccacgggtagtggaaaaaatcgccgctgaaacaaatgaggttatgctagtcgatcataatgaattccaacaaagcgttagtgatattgaagatttaacaattttagctgtggtagatcatcatcggatcgcaaacttccaaacggctaatccactatactatcgtgcagaaccagttggctgcacttcaactattgtgttgaagctgtataaagaaaacaatatcgcagttccggcgaagatcgcaggtataatgctttcagcgatcatttctgatacattattattcaaatctcctacatgtactcaagaagatattgatgcagcaaatgagttagctgaaattgctcgtgtagacttaaacagctatggactagatttattaaaagcaggaacaaacttaagcactaaatctgaagcagaattattggatttagatgcgaagtcattcccaatggctgataaaacagtccggattgctcaagtcaatacggttgatctagacgaagtgttcgctcgtcaagatgcattgcgcgatgccatgttagatgaaaatgttaaaaacggctatgatttattcttattgctggttacgaacgttctaaattctgattcagaactattagtggctggagaaccaagagaaatggttacggaagccttcaaggtaaaactggaaaatgaccgtgccttcttgccgggagttgtttctcgtaagaaacaaattgttcctcaattaacagaggctttcgaaaaataatttagttttataaaaagtggactttcaatagtccacttttttgtggaaatttttgattaggattataatgcgaatgagtcatccatttgttaaaatccaattggattttaacttgtttcttccgttgagaaagaaggctattatggaaatatttactaacgacaaaaatattcaaaacaagctgaatcgttctgaatttcaagaattgttgagctattttaaaggattgagagaatcagtcattttacgagaaattcggaaaaaattcccggatcacaagcatttagataaagatttagaatttctaattgctcatgggattgtttctcgccaggatcgtcgttacgagcttggattaccgattataacggactacccaacaagcggtcttgtcgagcattttatccaaaagacgaataaagagtattcagctgaggatttactggtttggttgagtgaggaacattggaataatggattagagaaaatgttagctgttgactttccaatgccctccagatattgcttagaaaatgcagagtttcgtctagtcacgatcaattcgcgccaagaattatcagaaacactgcccaattattttggaaacagtgatgaaccatcattgtttcctaacttagcaggactgattggcgatgttaaccctgagttttttacgaatcagctcaatcttattcttgaacgagtattagcaggaaaagcccctcgacgaacgtcaattttcctaaaaagcttgatagatagcggcgtcattgcagaacgaccagaatggcatgtgtctattccagtttatgataagaattttttggttgatccgattcgagagctagataatgacgcagcattttttttcagtcggcaattggcagagcgactattagataaacaagaaagttttacgtatttaatgaagaagaaggcataaaatatgcaaagaattatcaaggggattattctgatcatcagctttttactcgtatttacagggatttattatgcaaaagttcgctattttgggcctggaacactagtaaaacaaaaatcagtccattattctgacgttcccacagtttttatccatggatatgaaggaaattccttttcttttggtcctttgctgcgacgattagaaagagaaaacgtggctaaacgagaaatgaccattgtcgttcaaggtgatggtaaactaacgatcgaaggcaaactaaaaaataccaatgataacccaacaattatggttttgtttgcgaaggatgtgacagatgagattacacaaagtgaatggatcgataaggtgatgcgttatctgtatcaacaaaaggtcttccgtgttaatttggtgagtcattcaatgggcggtgtttcttcgttgcgctatttattggaatatgccggtgatcgaacaccaataacagagcgttttgttgcaatttcagccccctttaatgacttggaaatcgcagaagatacagaagaaatttttgcttataaattaacagaaaagggtcccattggtaaaacaccaatttatcagtatttcgatcaagcgatgggaagactgcccaaagagatacgtgtccttgatgttgctggagatttaaaagatggtaccgaaagcgatggctctgtttcgactcatagtgctttcgcacttcggctgctatttctggagcatgctaagagttatcaggaattcattgttaaaggaaaaagtggtgaacactcagcgattacgaaaagtgccgagttagaaaagaaactaatcgaatttatttggaagaaagcagtttgaggctaaggttgattctttctaaagtttaggcataaacccaaactttagaaagaatctctaaggcttcaggctgcttttttgtcgttttcgaactttcttggtccagaacccaccagaaatgtatttcggctcataggagataatgaacgctcgggcttcaatctctttaattagcgcgtagagtgttcgctcagttttacgtggtgagagaatctctaaaatcatgcgtccgccttccaaaccttcaccataagattgcgtcacgccgtacccattttctctcaaaatacgaggcaagctggtttcttgctccgtgtttgtcgggagaataaccgtgaccatgatataacctagcgctaacttatcttcaatttttattcccacactaatcccaatcgcatatcctaacgcatacgttagtaaattaatagggttgtctaaacgatctaaaaccattgaaagtcccaaaatataaatagtaatctcaaccatgctcattaagggcgccaaaatacggtagcctttcattgttagcataaagcgcagtgtattcaaagtgacataagcaaaattgataaaaaatatcattattagcatttttacatcgatcattataaaacctccattatgtgtaaagttcttatttattggcatcattatacttagtttgtttcatatgacctagcctaacgattattttgtcaaaaggcaaatagaaggaagtcatgacaaaaaaaattctttattatttgtcaaaaaaacagatattagaaataataattgttatttattggggaaaaatggaattatttaaaagaattgaaaattttatcttctattttaaatcttattataatataatgttagttagagggatttaataatgtaacgaacgacctgcaaggcgtattattcgttatttattagggctccgtgttattataataaaacacccgacgtttttattattaaactttacacattgaaatgtaatataaggacgctacgccgttcgttcaaaaaggtggttctcatgaaaaataaaaaagaagatggaatgcagcaaatggatgatgctaaaagaacatttttgtctggagaaaatttttatgcgcaacacttacttggcgctcaccgagagaaagatggctatgttttccgagtatgggcaccgaacgcactcgccgtttttctagttggtgattttaatggctggcaggaacaggtgatggaaaaagatgagacaagcggaatttggcagatttatacggaagatgcacatgaaggggagctttataaattcaaagttcgtcaagcggatggtcgtgaaattctaaaaattgatccttttgcggttcgttttgaaaaaagacctggagatgctgcggaattgtacaatttccctgaaaaaaaatggaaagatggcttatggcgcggacgtaataaacgttcaaatgcgtttaaacgcccgttgaacatttatgaaatgcacgcaagttcatggaaacaccatgaagatggaacaccctacagctttgcggatttgaaagaagagcttgttccttatctcgttaaaatgaattacacccacgttgagtttatgccgttaatggagcatccattagggcgctcatgggggtatcaactgatcggctattttgctttaagttcgtattatggcacaccggaagagtttcaagattttgttgaagcttgtcatttgaataatatcggtgtatttgtcgattgggtaccaggtcactattgtattaatgatgatacgttgccatattatgatggcaccccgcagtttgaatatacagaccctgatcgggcgaaaaacaatcgctggggctcaatcaattttgatttaggcaagccacaggtacaaagctttttgatttcaagtgcgatgttttggatcgagatgtttcatatcgacggtattcgcgtagatgcagtgtctagtatgatttatcgagattatgatgatggtccttggacaccaaatcatgaaggcggaaatcggaattttgaaggctattattttttacaaaagttgaatgctgtcatcaaactggcacatcctaatgttttgatgattgctgaggaaagctcatctgaaacaccaataacagggatgattgaaacgggttcattaggctttgattttaaatggaatatgggctggatgaatgatgttcttcgtttctatgagatggacccaatttttcgtaaagacaatttcaatttgatcactttttcgtttatgtacatgatgcaggaaaatttcattttgccgctatctcatgatgaggtagtacatggtaaaaagagcctgatgcacaaaatgtggggtgaccgttataaacaatttgcgcagctgagaaacttgtacacctatttcatggtacaccctggtaaaaaattattgtttatgggtagtgaatggggacaatttttagaatggaaatttgatgaaggcctagaatggattgacttgaaggatgctttaaatcaatcgatgcagtattttaccgctgagctgaatactttttataaagaacagactgccttgtgggagctagaggactcatacgatacgatcaagatcatcgatgcagacaatactagtgaatcagtcttaaccttcatgcgtaagggtaaaagaaaaaaggatttcttaattattgttctaaatatgacaccgatcgaacgtcgcgaatttcatattggcgttccatatccgggaacatataaagaagtttggaatactgaaatgaaagaatttggtggaacttggacgaaacacaatgaggattgtcaaagtgaaccaatcaaatttaaggagtacggtcagttgattaagacgactgtcccagctttaggtgctattattttaaagccagagtcagtcaacacacgcaagtaatagaggggaggtcgatgaaggaaagtccttcatcaaacaaaatgaaaacagaaattttagcaatgattttagccggcgggaaaggttctcgtctcggcaaacttacacaaaaaattgcaaaacctgcagtcccttttggcggtcgctatcggattattgattttacactaagtaattgtatcaattcaggtatcaataatgttggagttgtaacgcagtatcagccattggcgttgaataatcatattggaaatggctcgagctggggatttgacggtcttaattctggtgttacgattttacaaccatattctagcaatgatggcagtaagtggtttgaaggaactgctcacgcaatctatcaaaatatggactatattgatcagatggacccgcaatatgttttagtcctatctggtgatcacatttataaaatggattatgaagcaatgctagaggatcataaagcgaacaacgcttcattgactgtcgcagtaatcggagtcccaattgaagaagcttcacgatttgggattatgaataccgatgaaaatgatcggattatagaatttgaagaaaaaccagaagaaccaaaaagcaatcttgcttcaatgggaatttacatcttcaactggagccgtttacgcagcgtactgttaaacagttacaaaaaagatgatcaaatgctggacttcggaaaacatgtgattccggcttatcttgaaagcggtgaaaatgtctttgcttatcgttttgacgggtattggaaagacgtgggtacgattgattcactttgggaagccagcatggagtttatcgacccagaccacagcctgaatattcgtgataagaattggcggattttagcaaaaaatacaatttcaccacctcatttcttgacagaaaatgcggatgtgaaagactctctagtggttgacggttgttatgtagccggtgaagtaaaaaacagtattttatcggatgatgttcaggttaaagaaggtgctaaagtcgttgacagtgtcattatgcctggcgcaacaattggtaaaaatgtacaaattacgaaagcgattatcggtgaaaatgcgattattggcgatgatgctgtcgttgatggctcagaggaaattgctgtagtgggttattcagaagtgattggagtgttgacaagtgagagcgaataaaatgtgtgccattttgggcaatgtgtacgaatgtccagaattattacctttaactgaaaaaagaccattggcaacgttgcctttcgattgtaaatatcgtctgatcgactttaatttgtcgaacgctatcaacgcgaatataaagtctgtatatatggtgttcaatcaaggaaccaccaagtctgttttcgaccatattggaggcggccgcgaatggcatttggacagtgttgatagtcgctactttattcatttctatcaagatttcttgaagaaaaaagccgaaggtcgtccttattttgaatcagtgattgattatttgaataaatcaaaatcggaatatactgtctttatgggtaatcgtatgctttacaatattgatttggaatctgttttaaaaattcatctgcaaaatgatagtaccatgacggttgtttataagaaaatgccgaagaatcaaatttatcgtcaagatgaaatcatcgaagcagacgaacacggtattgtacaaggccatcacaatttcttggaagataaaacagatgacgagctgttgaatctcagtatgaaaatctttatttgccgcacggactggttgatcaatgctttgcaagaagggcaaaacttaggcggaccagttgcactcgtggatttcttaactttagcaatggatcaagtaaaaacatatgcttatgaatataccggctttttaagcaacatttttgatatcaagtcttattacgatgcgaacatggccatgctagatccaaaaaaattcacttctctgctttattcaaaacaaaagatttatactaaattgaagaatgaagttgccacctactactctccaacttcggaagtgaaaaatagtcagtttgcaaccggctgtttggtagatggaaaggttcatggatcgctgatcgctcgaagcgtaattgttgaaaaagatgcagaaatcgaagaatcaatcattatggcaagctgtacgattagtgaaaaggcctatattaagcatgcaatcttagataagaacgtggtggttgaaccaggtattaagatcatcggttctgctgaacagccagtagtgattaagaaaaatacccatgtgttaagtgacgtttacggaggcgaataggcgtgaagacattatttgtagcagcggaatgtgcgcccttttttaaaacaggaggattgggtgatgttgccggtgctttgccaaaagcattgaaagaaaaaggaacggatattaaagtcgtgcttccctttttcactaagatgccgcagcgatataaggatcaattacaagacttgttctcttatgatgtttatgtcggttggcgcaaacagtattgtggcgtgaagtatctacaaatgaatgggattgattactactttctggataatttgtattactttgatcgtccagaattgtatggatactttgatgatggggaacgttttgccttttatcagcaggcagttatcgaattgatggagaaaattgattttattccagatgtgatgcatttgaatgattatcatacatccttcattccttgtctcttaaaggaaaaatatcgttggattcagaaattcagcaaaattcgaacagttttaacgatccataatatcgaatttcaaggtcagtacgatcgcggaattttgtatgatttatttggtatgggtagtgaacgttatgatgatggctccattcgttttaatgactgtgtgaactttatgaaggcggggattctttatgctgatcgggtaaccactgtcagtccgtcctatgcagaggaaatcaaaactccagaatttggtgcgggtttagatgtgattttacggatggaaagcgggaagttaagtggaatagttaacgggattgattacgatacttttgatccagcaaaggacccagcacttttcgctaattatgatcaaagacatcttgataaaaaaatcgaaaacaaggtccaattgcaaaaatatctagagctgcctgttcgtccagaggttccagtgattggtatcgtcagtcgtttgacctatcaaaaagggttccatttgctactacaggaaatggataacctgctgcaatttgacgtgcaattagtattgattggtacaggagatccaaactttgaaaatcagttccgtcatttcggcgaaaagtatccgactaaaacaagtatacagattacttttgacgtgaccttagctcaaaaagtttatgcagggaccgatatgttcttgatgccgtcagcatttgaaccttgcggcttgtcgcaaatgatttcaatgcgctatggtacgttgccgatcatacatgaaatcggcggtttaagagatactgttgagccttataaccctatcacgaatgagggaacaggctttggttttaacatttacgaatccttctatctgatgaacgcgatgaagcaggcgattgaactctaccaaaatcatccagatgtttggcgagggctgatgcgtgaagcaatgtcgcgagatttcagctgggatggatcaagcgagcaatatttagaactatacaaacaaatgtaggattcgaagagccagaatctaagccattaggcgttggattttggcttttttctatcaatactttcttataaaaggtactatgtatgtattaagtaatacacgtaattaaaaagtgtaggttggagatgaaaaaaatgaacaagacggaatttaaaaggctattcagtcagcggttggcggagaaatttgcaatggaagtcaatgatgcttcaccaaacgagctctatcaaacattaggctcgttactgacctctacatactcacaaaattggcagcagacgtggaaagactatcgagaagcagaacaaaaacaggcatattatttttccattgaattcctaccaggaaaaatgttaaagagcaatcttttgaacatgggctggttggagatggttacagaagctttagcagaattgggaatcgacttagaggatttagcagaagtcgaaccagatatggcgttggggaatggcggtttaggacgtctggcctcttgttttatggattcaatcgcctcaatgggcttacctggtaacggaaacgggattcgttacgagtacggtcttttcaaacaacgttttgtggacaattatcaggttgaattgccggacgaatggctacaaaaaggaaatctttgggaagtccgtaaagagagcaaagcggtagatgttcgcatcggcggagatgtttacatgagtcatgatgacgctggcaatctgattccaaactattcagggggcatggtggtacgtgcggttccttatgatactggaatggttgggtatcaaaatggcatagtaaacacgatgcgcttatggtcggtagaaattccacctgaggaagaggagcgttatcgcagtattggtgatcgacgggcggttgaggacttaacttccgtgctatatccagatgattctaacgaggctggaagaaggctaagattatctcaggagtatttttttgtttcagccggagtgcaaagtattttgcggtattataaacaattaaagaagccgatggaggaaatcaatcaatatattgcaatccacataaacgatactcacccagcgatgtgcgtagctgaatttatgcgactgttaattgatgaagaaaaaatgggctgggaacgagcatggaatgtgactcaagaagtaatgagttatacaaatcacactatcatggcggaggccctagaaaaatggtcgatcaatatgatgaaaagcgtttgtccaagaatttatcaaatcattgaagaaattgatcgccgctttgttgaggaaatgactggggtccacgattttgatttgattcaacgaacaagaattattcaaggcgatcaggtgcatatggcgcatctggcgattattggttcccattcgatcaatggcgtggccaagcttcactccgatttactaaaggcagtcgtcttgcatgacttcttcttactttaccctgcccgatttaataacaagacaaatgggattgcgatgcgtcgttggacgcaactagccaatcctacgatgagcaaggtgttggacgaatacataggagtttcttggcgcaaacaaccgagagacctacgtctattattgaattacgaggacgatgaccaggttcttaatgctttagcagaagcaaagttggaaaataagaaacgtctggctgcctatattcaaaaacattgtggagttgaagtgaacccgcaggcgatttttgatgtacagattaaacgattgcatgcctataagcgacaattgttaaatctcctgcatattattaagctctatttggatttaaaagagaatccggagctccctatcgaaccgcgagtgtttatttttggagcgaaagcagcaccaagctatcactatgccaaatcggtcattaaagtgatcaatgaaacggcaagcttgattaaccatgacacatccatcaacgacaaattgaagatcgtctttttggaaaattataatgtgagtttagccgaacgaattattcctgctgctgatgtcagtgagcaaatttcactagcttctaaggaagcatcaggtacttccaatatgaaattgatgttaaacggtgcagtgacaattgcaactctggatggcgcaaacgtggaaattcgtgatgctgtgggcgatgataatattgcaatcttcggattgacggaatctgaagtgtatcaatattatgaaaatagaaactattcttcagccgatatttacaaggatgatgcggttgtccacaaagtagtaaaagcattgattgatggtacgattcctaatattatttcagaaggtcaggaaatttttgactcattaatcaaatataacgatgaattttttgtcttgcgtgattttgcagactattgtctggcacagcaatcagttgatcaagcctataaggacaaaagacgttggcgccaaatcagcctgcgcaatatcgcgaatgctggacgcttttcttcagacaacacggttcaacggtacgcagatgatatttggcaaatagaacctgtcttcgctcatgaagacgatcgaggtgtaacacaacatgactcatatctactttaatccctggttagaacgttataaacaaccatttggtgctgttcaagaaggggcgatggtcaatgtttggctatctgtcccagaacagcagaataccaaggtttttctagtcgttcgtaaagagggaagttctgttggacagaaaatctttacgatggagcccgctacagaagatcgatttcattttcagacgattatggatcagggctggggactgtacttttactattttaaaatcgttaatgaagcggaagggcatgaaaccattcagtattatggtttcaaaggacaaggtggtgaagggcgaatttatggttcggaacgagaggttatcccttatcagctgacttgttatcaaaagtcagaaaacgcaccgaaatggtatcgaaatgcggtgttttatcaaatttttccggatcgttttgctaacgggaatccgaatcgcgttatcaatcagccgaaaaagaattctttcatttacgcgacggaagaggacgaacctttttatattaagaacaaggaaaatgaaattgttcgttgggacttttttggcggaaactttaaaggaatccaagataaaattccttatttgcaggagctagggattactgcgctttatttgaatccgattttcgaagccagttccaatcatcgctatgataccaatgattattttaaagttgatagcattttagggacagaagaggagtttcgcagcttgatcgcggctttgcatacagcaggaattgctgttgtgttagatggtgtcttctcacatgtaggaaaaaatagccgctatttcaatatttctggattttatggcgaaaattcgggagcagctcgtgatccacaaagtccatatcgtgattggttcacgtttaatcattatcctaatgattataagtcttggtggggtgtggcagatctgccggaagttagaaaagaaaatccaagctttcaagaattcatttatggcgatctagacagtgtactatcgaaatggacttcgatgggggttgatggttggcggttagatgttgcggatgagctgactgatgatttcatcgccggcattcgtaaaaatctactgtcctatcaagaaaaaatcctgataggagaagtctgggaagatgcttcgaacaagattgcttatgatactcgccgtaaatacgtttttggggatcatttgcagggagtaatgaattacccattacgccagcagattttagatatcctgaagcaatcacgctcattgcaggatatctgcgaggaaatgattcgctatcaggaaaattatccagccgacttttattataaccaattgaacaatattggaacgcatgatacggaacgcattttaacgatgctagatggttctgttgaagcgctggatcaggcttggggactaatgtttatgatgccgggaattccttgtatatattatggggatgaggctggattaacaggtggaaaagatccagataatcgtaagttctttccgtggaaatcgattaatccgagactatttaaaaattgtcagaaatggatagagcggcgtaagaaatacgacgttttgaaaaatggacagtttttcccgttttattcaaagacgcagaaaatttttgggattattcgctattcggggaacgattatgtaatctatgccatcaatttatccgatcaggagcaaagcttgaacgtcggagagctatctagtccgcgtgcgtatcgcggggaatacgctgttttagaccgaattttagaaggcgaaattttggcaccaaaaggcagtctgtttatgtatgattcagaataaccggctgcttgcgttgtattttctgtttcttaggaaattaaaaagcatttttgcttcttttatgctaaactattgctatatcagaacaatgaggatgattttatgcaaacgtacaccagaaaaaagtgccgctttcctgcctttgatgatgatgcaggagttaaaatagtacaaacgaaccagcgtgttttatttgatggacaagacgacttgattacgagctatcgtcttgaggctaaagatatttttgaacgtcaattgccgaaagcaaaacggaatagacgggtcagtttagacgatgagccacgaagagaattagatcatcataaagcaaatctacctaaataccatgatcataaagaatcaaaaaaagtgaatttgtttgaagaacggaaaccgaaggaaactgcaaagactaactttaatactcgtagtgcacgaaacggccgcagtgccactccatttgcaccgaaatatgttccttcttctttgattccagatacaccagcggatgcggtatcaccgagagaattgatgagtcgaatggaaaaaacacctcaatcctacattttatttgcttctgaaaacgaagaaaagcagccggtgatggaaagaaaaaattcgcgtcaacgtttggatcgttcattaagaggaattatgcaagaagataattcacagatcgaaaatagcaaatattttcacgattagacaggaggtgccttagggcattcttctgttgtttttagtcattgaacttttttggttgaatagtagaaataatttgtacgaagtaacaacaatgaggagagtgcatatgaatccatttgaagaaaaaattcgtcagttaagagcaggagaaatcgatcaaatcgaagtgtctcgggatgatttctttttattccgcgaagcttggatcaagcaagaagataaaaaattctttcgcggaattgctgggcttaagggaaatattacctacgtttatgatacaacgattgtttaagctattgactttttgatgtcagctcggtatcatgaaaaaggttctgcgcggcggtgttggaattggcagacaagcatgactaaggatcatgtgagagcgatctcgtgtgggttcgagtcccattcgccgcatgaaggatgtaccagacagtggtgcattcttttttttgcatctaaaacgctatgttataattatttctttgtatcctgttcaacttcattcaattcttttgctaatttagaacacaggagttgcttgtcaaatcgtcatcggataaaattaaattattaaaaatgtgaatttgcatattttggaggaagcggtaatggaagcgattggtcaagtcttaaaagagtttagaaaagagcatggcatgacacaaaaagacctttctcaagggatttgttcccaaagtgtcttaagtcgaatcgaaaacaatgaagagattccaaatatttttgtgatccaacagctttgtcatcgactaggaattacgatcgaccaacttatgcttgattttctaccggaagaattattcctgcgaaaatatttcaataagatgttcatgtatttgcgaattggaaaatacttagaaatacgtgcaacgttggattatttggatgaacgtcagatcactcatttagataaagatcgtcaattagcttgttttttcaaggcagtttgtgcttattttattgataaggatgcggaggctgctctggaactagttacacagggactatcgatttgtgtttcaaaaaaatatgacggctattttgacagtcgaatactgctattaagttttgctgggaaaatgagctcggttttagaaaggataaatgaagcacatacttattacaatcaaagttttgaattgtttaaaacgatgatggcagattattcagagcgtagtgaattgagcaatctttttgtaaattatggaacgtttttagtaaaacatgatcgtctggatttggcagaaaaggttgtagatatggggataaaatggaaccgacagcaatgtagctattacaagttgaaggaacttttggagctaaaagttcttatgttggaagcgcgcgatgagattcacttggtgattaattatcggaaaatgctgcgtgcattagagaaaataaaagatttgtaaatggtctacaccattcttgacttataatggattcaggagtaactttaaggtactaagaaaaaaagggagagctcacaatgaaaacatttatttatgctgacaaattctttttaaactctggtgtaaaaggtgcaggttatttagatgtcactgatggcatttttggagcatatacgaaggaaaaaccagaaggagcagaaatcattgaccaaagtggaaaatggatcgcccctggtttagtggatacacatattcatggctataaaaatcatgacgtgatggacaacgatgctgatggcatcaaggttatgtctgaagctttattatcttgtggtgtaacaagtttcttaccaacaacgctgacttcttcgaaagaacgtttgaaggatgttgccgaaacaattggaaaaatgtacaaagaggttgacggcgcgaaaattcaaggaatttactttgaaggaccattctttacagaagaacacaaaggggcacaaaatcctagctactttggtgatccagacttggatacattccatgaatggcaagaagcttccggcggtttgatcaaaaagatcgctttagcgcctgaacgtaaaggtgttaaagagtttgtcaaaacagtcactgatgaaggtgtagtcgtttcattgggacactcaaatgcgacattggaagaagctcaagaagccgttgaagctggagcaagcgtttttgttcatgcttataacgggatgcgcggcttgaatcaccgtgaaccaggtatggttggtgcactattgaccttacaacatgtcttctctgaattgatttgcgatgggcaccatgtgcatccacaagcagctgaagtcttgatggaaaaggctggacatgatcatgtggcattgattactgactgtatgatggcaggcggtatgcctgatggtaactacaatttgggcgaattcccagtcgtggtcgcagaaggaactgcccgtttagaatctggtaatttagccggaagtatcttgaaattgaaagaagcaatcaaaaatgtggttgattggggaattgcgactccggaacaagccgtgatgatggcttcatatgtaccagcagtcagctgtaaaattgatgacaaatgcgggatgatcgctgaagggcgcgctgcggacttcatcgtattagaaactaacatggatcttgtagcaacttaccttgatggtgttgaacgctaccacgcgtaaatgaaaataaatttttaactcggtcaattttttgatcgagtttttttgattttgctcaactttttatggtaaaatttttggcaaaagtttttgtgaggaaaaatttaattaaaaggagaaatctatgggaccaataattggtgttatgccgctgtacgatgaagaccgtgatagtatttggctgttaccggggtatcaagatttgattgaacaaaatggcgggattcccctcatactaccgttgacgactaataaagagacgttgcgtccatttttgtccatttgcagcggttttcttttcactggaggacaagatgttgaccctgctttgtatggagaagaaaaacaaccagtctgcggtccacaaagcctaactcgtgatgaaatggagctttttttcatgaaagaagtgatagccgaggacaaacctttactagccatttgtcgaggtgtccaattactaaacgttttgtgcgggggcacactttatcaagatctgccaagcgaatataagagtaagattgatcaccatatgaaggctccctatgatcaagttcaacataaggttgatctgcctgaagatagtttgttacagcaactattgcagcgagatgaaatgggagtaaatagttatcatcatcaggggattaaagatttgggtgctggattagaagtgacagcgatctcgacagatggattgattgaaggcatttctttaccagatgcggaattcgttttaggtgttcagtggcatcctgaatttttcaatgctgttacggtggaaaaccaagcattgatggcagcgtttcttgcagcatgtaaataaacgcacgctaaatcaaatgtaaaatgacttaacgggaggaaaataatggcttatgaaggaagcaaaactatccctgcagacaaggatagttttctttggatgattgatttattaaatgaatggcaaattgattatcgggtggaaggcggctgggggatcgacacccttttaggaaaacaaactcgagagcaccgagatatcgacattgattttgacgcttccgctgaggcagaattaatggaaaagctattagaacttgggtaccaaatcatcactgatgagcgccccacgcgggtggaattgtatcatcctaaacatggcttcctcgatcttcatccctttgaccttagtgaggcagggaaaatgaagcaagcaaatcctgaaggtggttggtttgagctagaagccgattggttttcagaagccatctttgaaggacgcatggttccttgtgtttctgttgagggacaaagattgtttcacagcggttatgaattaagaaagatcgatataattgatttggataagctgaacgatagctatccagtcgacaattctcagtaaaacagactgagattactcagctagaagatagataggattcgacttcatgctgttgtagtcttcgtatttctgtttttgggaatgcttgataatctttgcgacgataaagcgcgtgatgatgatccgtgctttttttcttattttcagctaaatagtctgcataagcttcgtcatttacaaaaattttataggattttcgaccagtttcgctgatgatttcgtagataccacagggcactccttgaagctgatcagcaactctcaagtagagctttgcgatctccaagctttaaaaaggaaaatcaattcgttgcagttggcgcttctcatctttttgagaacaaatacatctaccgcaggttccgcagagatactgttcgtgattttctagacagtccctttttcctagtaaaggtgtcgcgcgacaatttactgcataacattctgcacattcttccatgattataatcctccttttttctttattatgtaatcaaaaactgcagttttcaatcatttttttaaagtatatttttgtaggctagcgacatctgtcgttggctttttttttcgctatgttaaactaaaggagttaataattatgatagatgagggggattattcaatgtcttatattgatgttatagatgagagcaaatattacaaaatgggtgagaccattatcaaagccaatgaaaagataaatttctcgatcgaaaagggagaggtcgccgtaatccttggtccaagtggagcaggaaaatctacagtgttgaatattttaggcggaatggatagctgtgatgaagggaaagtggtggtggatggaaccaatattgctgctttcagtgataaagaattaaccacttatcgccgtaatgatgtcggattcgtttttcagttttacaatttggttcctaatttgacagctaaggaaaatgttgaattggcctcacaaattgtttcggatgccatggagcctgaagcagttttacaatcagttggattaggtgaacggatggataattttccagcccaactttccggtggagaacaacagcgggtaacgatcgcacgggctttggcaaaacgaccaaaattgttactttgcgatgaaccgacgggggctttggattttgaaactggaaaacaaattcttaaaatattacaggatactgctcgggaaaatggcacgacagttgtcatcatcacccacaattcggcgattgcaccaatggctgatcgggtgattcggatcaatgatgcccaagtgcgcagcgaagagttaaatgaccatcctcaatcaattgaagatattcagtggtaagaggtgaataagatgaaaaaagcgatgcgacgaacgaattggcgtgagattcgccaatcaaaaactcgatttttctctatcttgggaatcattttcctaggtgtcgctttttatgttggcttgcgggcgactggaccagatatgcttaagacggcctctagttattatcagaagcagaacctggcggacacacgagtggtctcttccctcggaattaccgctactgaaattaaaaagattgaagaagttgaaggcattaaagcagaagggcgttactttcaagacgttaatttgagtaaagaagaccaagtctttcgtatttttagttatgattcaaagcagacattgaatcgcgtggtggttactaaaggacgtttgccgaaaaactcagaagaaatcgttttggatgatcgagctttagaaaagggctataagctgaatcaacgcttcgacatttcagctgatgagacacaaaagcatttcaaaagagcaaattttaagatcgttggtttcgtaaaaagccccgagtttattgaaacgatttctcgtggaaatacgacagttggaaaaggatcaattgattgcttcgccttcattttgccagagagtttcacgcaaaaggtctactctgaggcgttgatcagctacaaggatttagaaaaaagttctgcctattctgatcagtatgaaaaacgtttgaagaatgatcagaagaaactgaaaaatcaattaaaggaaattgcacctcttcgtttagctgatttaaagaaggagcagcaagaaaaactagatcgggcgaaagagaaattccagcaggaaacatccttagatattgatcgacttactcctaagcaattgagtgggataacggcattgaatcctgagcttcctgagcaattagcgactctggaaaaacagcagcaaacgattgatcagttgccagcgccagagttccatctgtttgatcgctcagagaatcctggctatagcgagtttaaagacaacgctgaccgaatctcgtcacttgcttcggtctttccatggatcttctttttgatcgcggctttagttacgctaacgactatgactcgaatggttgaggagaagcgcaatgaattaggaacgtttaaggccttgggttatcacaatggtgaaatcgcggagaaatatttgctctatgctacattggcaggtggcggcggaacactactaggtctagcagtcggtttctacttgctaccagtgattatttttgatgcctatgggcaattgtataatctggaggatgtgttaacaccttggtatctatcctatgcactaattgctttagctgtagccttaatctgttctgtcggctctgcttggcttgttctgcgctacgatctaagagcaacaccagcaactttaatgcaacctaaggcacctaaaaatggcaaaaggatctttttggagcgattgggctttgtctggcgacgactgtcattcagtcaaaaggtgactttgcggaatttattccgctataaacagcgaatgctgatgacagtaatcggaattgccggttgcatgtcaatgattatcacaggatttgggttgcgagactcaattggcgatatcgttaccctgcaatttgataagctttggcattatcaaggaacgatagttttcaatgagccgccatcatcggaacaagaacaaagctatgtgaaagagttggatactttagcgaattttcaggcgcatctgtttgtttctttagaaacctttacggcacaaacagaaggagtttcaaagcaggaaattagtctttcggttcctaaagaaacaacgaagctatctgattttttgtcttttaaaaatcgaaaaaatgatatccgttattctttaactgataatggtgtcattatcaatgaaaaactggcaaagctatttgatttgaaacatgggagtcactttaaaatcaagtctatttcaggcaaagagtacgaggtaaaagtagcttcagtggctgaaaattatgttggacactttatttatatgacaccgaactattatcaacaaatatttgataaagagccgacatacaatacggatcttttacttttcagtaaggaaccaaatcaagaaacagaaaatcgaatagcgaaacaattaatggaaaactccgaaattgctaatgtcagctttatgtcgaagtcacgtgatgtgctgaaggacacggtgcgaagcctcaatattattatgtgggtattaatcgtttcagccggacttctagcatttatcgttttgtacaatctgaccaatatcaatatctctgaacgaattcgggaattgtctacgattaaggttttaggcttttatgacggcgaagtagttcgctatgtctatcgggagaatattctgttgacgctgatggggattttgttaggattggttttagggaaaatcgagcatggctatattttacaaacggttgaactggatctgactatgttttcgccggatattcaaccgttaagttatctttatgctagcttgattaccttgttctttacgctggttgtcggaataatcatgtattttcgcttgaagaaaatcgatatgattgaagcgttaaaggcaaatgactaaattcttactatgtttaatctcataggaaacatcggtagcaaaaatactgatttcctaggtggtgtttttaccgtgaacaaataaaggatcaggcctatttatgggtctgatcctttatttgtttgcgtacgtcatacagcattttattcagatccgcctcttttttgcgcagttcaactagatcctctttgatctgtttctctttttcatctgtctgaggcgaaataacgccatttaaagaaatcccaatgattgttccgatgaacgtgtctaaaacacgattcaacgcgtaaacaaaggactcaccttgggggatactcaaggcaatcaacagcatcgtagcaattgctgaaatgattcccgaattattattcagtccatcagagagaacgatcaccaagatcacgaatagaggtaaaatgaacagttcgatcaaaaaatcatttttaaaaaaagcttgaatatagtaaaaaatcaaagctaataatccgccaagggagtttcctaatacgcgggaacggccaaaggagatgctcgtggttagatcctgacgcagagaaaaaacggccgccaatgcagcgatcaacggagaaccgcgatcggtcacatgaaataacaaaatacatagcatgacagctaaggcggtttttatcgttcgcatacctaaacgaaaacgaccaatttgcaatatttcctcctactttcttttctttatacttaatagtttagcggaactttgacaaaaaaacaaaaggcattgcctaaacaatgccttttgtggaggagactattggttttgtcgccatttttgctgcatttgatctagaatgtcgatgacgtcttttgtgaaaaagagtgatttattcggtatttcaccttggatcatttgcaccatatgttcaatctcgtaattcattgcattactagaaaatccggattcgattagttctctagttccatcgttaaagaaaatttccgcttgatcagccctaggatattcatcaatcgttaaatagccattctcaaatgcaacgatcccttttttcggcattttcgcctggaaagtcaagctaactgtagccagctcgttcttgtcattttgtagaattgttactgattgctcatcgacaccagtggaaaaaggcaccatggttgaggcgatcacagcaggctgttcagtcataaaccaacgggcaaaggaaactgcataggttccgatgtctagtaaggcacccccggctagatcaggattaaagaaacgattagttggatcaggttctttgtaactaccaaaaggcgcttggatcatttttaatttacccatccgaccagtatccataagtgcatgaagttccttatatagaggcatattaaagatcgtcatagcttcagctaaaaccagttcttttctttccgctaattcaattgctgattgcagctcagacagattcatcgtgatggctttttcacacaatacgtgcttacctgcttccaaagcttgcatgatatgttgatgatgctggcgatttggcacggcaatatatataatagaaatatccttatcagctaataattcttcgtagctgccatacgcttttggcaaatcgtattgttcagcaaatttttctgctttttctaaagtacgtgaggcacaagcggtaagtgtacttgttgtttggtcaaaactttctgcaaaactgtgggcgatgccgccgagtccgacaatgccccattgtagattggtcatagtaatcctcctaaagctagatttaaattttcaataataaatagataaaacttgttgcgtcattttccaaagtatagcagtaaatgttaaaatatttcaatcgatttgccaaagagctgttttttttctaaaaaatcagtaaaatagagaaggagggatttttcgtgaatcaaatttatttagatttagtaatgagtgcaatttttgaacaatttcataccgagcaagacttttaccaagactatttaggggtgaatgaggttcaatggcaacagtggaaagctggccaaaataacttaacaccagaagcaaaccaaaaaatcaaaaacttgttcagtgattatgaatggatgttaagtcaaaaagtgattcgccaaacttttttgttccccgaaaaacgtccaactgcagtagctgaatatcgtgaaatgaagacgatcgttgctcaaaaatggatcgccagtggattagctcaggtggagatgattccttttaaaaataaaaatgaagaagaaaaccatgattttatcgatttacgcgtaacgattgattatgatagttggggatatagtgatatactgagttttcgtttaccagctcatattcaaaaccaaatcgcaagtgcacataaaaagactgcattacttgattgggtaaatgagaatttaacggagacatacacgtcgttagacgattaacgagaggatttttaatttgaaaaaaacagtaggactactttcagtcatcatcatgttcgggatgaccgcttattcgcttttttacagcacgcctgcagaatcggatgctaaaaaagaaacagctacgacctactcattcgagaaagagaaaacaacgaagaagaaaaatgctgtgcaaaaagcattgccggattctaatgcaaatgattggaaccttgtattagttggtcctaaaaataaaattgaaaaagaagtagctgaaagtcagttgactacattatcagacaatagtcatcaagttgatagcagaattgctaaagattatgaggaattttctgaggctgcaacagaggcgggctttcctttagttgtcatctcagcctttcgttcggttgattcccaaaaggaagtctttgatacaaatgttaatggcttaatcagcggcaatggaatgtccgaagaagacgcgattgccaagacgaaagaaacgattaccgaaccaggctatagcgaacatcatactggtctggctatcgacgtcgttgaccaagattggtacaattcttattcgtcacaagtgttagacgcttcttacggggatcagcctggcgctaagtggatcgctgagaatgcaccaaaatatggctttatcatccgttatttgaaggatcgtcaagatattactggcattacttatgaaccgtggcatattcgctatgtaggtaaggaaaatgccgagtacatttctaaacacgatctgacactagaagaatttttgaaacagttgtcagccaagtaaggaggcaccatgcctaaaaaaacttatagaaaacgaaagtccaacgtgtcgatcccgttaatttttgccgggattttagttattgggttggctttcgttttttctttacatacattatccaattctggtgttgaaaatgaaccgcaggaagaaacgcttactcgccagcagttcattgatcaattagcacctcacgccaaacaattgcaacaaggatatggcgttttgcctagtattattttaggacaagcgattttagagtctaattgggggcaatctcaattagcgagtcagtataaaaatcttttcggcattaaagcttctggtgatcagcccaaagtaagtttggaaactaaggaatatgtaaacgagcaatggatcacgattcaaggagatttcaaagtatataattcttgggaagaatctctagatgatcatacgatgctctttgtgaacggaacaaattgggacccacagctctatgcaggcgttttgactgccaccgactataagcaagcagcccaagctcttcaaaccgcaggttacgcgactgatccggattatgcaaataagatcattagcgtgatcgaatcatataacttggatcaatacgaccattcatagtagaattggtttagaaacctgttagggagatggatgctatggcagaaaacaatgcacctgaaattatgactgagctacgaaaagatatcgtacgagtaccggaagtgatccaaaaagcttctggaatcgtcatttttggaaaaaaaattcgatctataatttttacaacagatatcgcgattatcagaaacacggatgcggatgcagtgattgctgtttatccctttacaccgcaccctgcaattaccaagagtattatagaagcagctgatattccggttttttctggagtagcaggaggcttgactcatggttctcgctcagcatatatgggaatgtttgcggaatcgcaaggtagtataggcgttgtggtaaacgggcctacaccagtagagaccattcaagcaatcgaagacgtggtggatgttccattaattgcaacggtcacttcaaaatactctaagattgaagaaaaactagcagctggagttgatattatcaatatcagtgctggaaaagatacagtggatgcggtgaagcattttcgtaaaatgtatcctgagcttccaatcatcgcaactggcggtccggatgaagagactattgaatccacgattgatgcaggagcgaacgcgattacttatacaccgccatctaatggcgttctgtttagtaagaaaatggaaaaatatcgaaaaatggaatatgacgagggtcatcaatagaaaaaccaccgagaatcggaattgattttcggtggttttttcgtgcgcttcttcttacgttttaggttcagttaagctctatttgagatacttttatgaacctaagaataagggggaagtattatcaaacgagtaattaataatcttggaatccttgcacttattttgggcggtgcattcatttatttgagtaatacggagaattcacctgcaaatagtcaaaccaccgattcatcaacagcagaaattttgatggcagataccgatctatcgactaatcaattgcttgatgtgcctttagaggatcaatatggtggggaggttgcgatggaaaatggctgcgagattacagcattatccatgctactaaactattacggatatgggacagataaaaatgaactagtcgacctgcttgattttgttccactttatgaagatgcagaaaaaaggattcacgggaatccccatgacggttttgtgggtaacatctatgaaggctacgaggcaatgggcgtcgctgtagaaccgatcgctgaagtggctaatgaagttgtgcaagataatcaaaaggttgtggctaataatgacacatcatttgatgaccttgtcagagttattcagactggcacacctgtctgggtaattacgacggttgattttcaagtaccaacggaggatgattttcgaacatggcaaacgaccagtggtgaaatagaggtatcacctttatgtcatgccgtcatcatcacaggtgttgacgaggagaatgtttatgttaatgatccctatggctataaaaatcgagtagtagatcgtactgattttgaagagatttatcagctgatgggcagtgaatccttgtatttggaggacaaataaaaagacatggaatttttccccatgtctttttcaaatctgtttcaaaagttcatttacgcgaaaatatgctggaacgttggtaataattgatcgaatgaggtaagctcgatgtcttgaatttgagacgttccttttggtaattggcgattacgatgattcagccagagagattgccagccggcacgctttgagccaattacatcattgttaaaattatcgccgacatataatgagttttcagggtttaaggaaaattgtttttttcctaactcaaaaatttctacatccggtttttcataacctgtagcttgcgaaatgatgatattgtcctcactgacccaatttaatagccctagctgcagaattttcttatattgatggtctgttggtccattcgtgatgatgctaactgggacttttttagatttcagaaaatcaagggtcttttcaacttcctgatgcatggtgatagcatcaagctcagcttcgtagacctcttggaaagtcaacgcttcctcatccgtaatatggggataatccaaatctttcagtgattgactgattcggtgagaacgcatatattctaaggtccattcttgagtaatgaccttattaaagtttgcgtcactatgaacacggaagcgggtgtaaagagggagcatatcttcctcgcttactagtggaaataatttctggactgctttacggaatggttcttgttgatcgtaaatagtatcatcgatatcaaatacgacagtttcaatcaaaatcgacacgcctttcattttcagcaaattttcaaattattacagttgctattttagtacaaaaaatcacacaaaaaaagagtaaaatcgttgattagaaaaggtttttactactaaaaaagacaaaccgctgtctatcaattttcagtatttggaactaaaaaaagatttctttttgaattctaatctattatgattagagtaaagaatttggataggtggagaaaaaatgatgcgaagaaaaaaaagacaagttacagatttagaatcaatcaaaaacttagtcgaaaaatcacaggttgtaagaattgccttgaacggtgaggattatccttatgttgttccagtgaactttgggtatgaatggaacgaggagaaattaacgctttatgttcacggtgcgaatgaaggtaagaaagtctccatgatcaaaaacaatcctaaagtagcagtagaaatggatggcaaccacaaattagttgaaggaacaagaaacgccgcatcctattcctatgcgtatcaaagcttgattggctttggaaaggctgagcttttagatgatttagaggaaagaaggaaagccttgcatttattgatggatcatgcggcaaaaggggctgagtttgatgaaattccagaaggtatgctgaagcgtacaggaatcattaaaattaccttggactcttatacgatgaaagaaaatatccatcctgacgataaataaaaagattgcaaaccgcattaaaaacggtttgcaatctttttttacttacggatctttttcaaacgatattcttcaaagtgagcggcatctccgcgactttgaacatgtgcgtaaattcccattaagaccgcaccaatcgtattggtcaagagatctcccatcgtgtccatcagtgcctcacgtccgactaatagtttcccggcagaagttgcatatcgttgaagattcatatccgcaacggtatcgcaaagaaattcccagaactcccagaaaacgccgcaaagacctgcaaaggcgaaaccaaataacaagaatagccaaggtgatgttttgctgatatcagcatccttcatgaaatatccgatcaagccatagccaagcgccgtcaagaccattggactcacggtatgcaggatcttatcccagaaggaaatgatcgagatcatgtgcagagaagttcctaaaaagacagaaatcactaagaagaaccaataaaaataaataattttttcaggtaaaacgattttgaataatttcgtaatgatttctggcaagaaaatcaaagcaatcccagctaaacactcgattacgaaaatcactccttgtttagtagagtatttaccaatcacaaattcgtaaatattgtagagcaaacagattgctccaaaaatcaaaagagccaaacggtattttttataattcatggaactcactaccttctataaaagattggatttgctctaacaacactttttcagtgctaacgattgtgccgtttaatttgattaatccaacggtataaagatttaagtaatgaaattgattttctgcaggtgtttgcaacgcctctaacttctttcgattatccgcgccttgttgacgagaatctgtatacaatccaataacaggaatgcctttcgcgtaagcaacgccgatttcagaagcaacacctgcatcaatggtcaatccatctaacaacgccaccatcaaatcactttttaaaacctcttcagtatcggcaagcgcgatcatcttactgtcagcatacgctgatttatcattaattccttcattttcctgaggtaaataaacggtgagcgttgaatcaatttctcgaattttttcaactaaatacttgttataaagtaagtcgctttgtgcaaatagcgatgcagcaaaataaatgtgtttagaagtagtcactaaaataagcctccatatctgggattgttgtttctaataattcaattgcttttttgtcggcctcaagccgctcaattcgcgcgagatacgcagcacgccgataattcatcagcatgcaggtcaaggtttgaatattcagcgcgattcgtcttccctgaggctgatcggaaatagttaactcatctgcgtcattccagctaagggcaaaaatgccattgttccattcagcaacggggtcctccacctcaaaatagaagggttcgactgatttttcaaatgggtattccaataaaaactcttttacatcaacgatccgcgccataaagaaaggagcaattgtctcggtgatttcgctgtcatccaataagaaggagaggggttcatttttaaaaatatcgcccttgacccaataaaccatcgaaaaatgcgcgctaataaaattccataagccattgcgtgcttcttgatttaagtagaacatttccttaatatggaaaacctcgtcagaaatccaataaaacaacacaccagtcggttttttatcagcgttatagtaaattgcggcgatacgttcctcttcattttcaaatcgccaatactcttcccaattcaattcctttcgaatcatcgccccgtgattatttaaggcaaattcatgatagacttgataaacatcaggatcatcgacttccttacgctcgacgattcctggcaggtcaacttgttttggcagctgggtgtctttgattttaaagctaagcttgtcagacataatttcccaacccttacggcgataatatgggatgttgtaaggatacaagtaggaaatccattgttgatcctcacgcatttggactaaagcctttttgattaaatccttcatcaagccatgattggcatattcgggataggttccaacaccagtaacgccgcccatttggaaaagcttcccgtgaatatttacttcacaaggataaatggctatctgggaaatcaaattatcaccatggaaccagccaaaaactttcgattgttctaagaccggctttttcgcccgcaccatttctcttttattctcgtatccgctattttcaatatcactttctgtcacttgaaagacataactaagcagctcatcatattgcgctaagtgttcctcacctacaggctttaagacgagctgttccttaaagtcactatccatacgttcatctcctaaaaatagtattatatgagttattccactaaactgattaaatagctagtagaattcagcctcaaattaatctatattctaagtatagcaaaacaagcatgatatttctcttactgacttttagaaataggggaaaagactttttttctattccgatcgttggtataattgacagtgctgattaaaagaaatgaggaacattgatgaatatagaagaaatgaagaaacgccagcagatgattcgaaatttttcgatcattgcgcatattgatcatgggaagtcgacattggctgaccgaatcttagaacaaacgaatactgtaagttcccgtgaaatgcaggagcaattgctagactcaatggatcttgaacgtgaacgtggaattacaatcaaattgaatgcggtcgagttgcattatactgctaatgatggtcaaaattatattttccatttgattgacacgccaggacacgtcgattttacctatgaagtatccaggagcttagccgcctgtgaaggtgcagttttagttgttgatgcggctcagggaattgaagcccagacactagcgaatgtttatttagcgttagacaacgatttggaaatcttgccagtcattaacaaaatcgatttaccagccgctgatccagagcgagttcgtaaggaaatcgaagatgtgattggaattgatgcggaagatgcggttcttgctagtgccaaaacaggcatcgggattagcgagattttagagcaaatcgtaacgaatgttcctgcaccaagtggtgatttagatgcgccattaaaagcgttgatttttgattccgtttatgacagctatcgtggcgttgtcttaaacgttcgtattacggatggaattgtccgtcccggagataagattcaattgatgagtaacggcaaaaccttcgatgtaacagaagttggagttttttcaccgaaagctgttcaacgagattatttgatggtaggagacgtcggctacattactgccagcattaagtctgtccaagatacgcgcgttggggataccgtgacacttgcgaataatccagcagcagaagccttggctggctatcgtaaaatgaatccgatggtgttctgtggtctctatccgattgatacctctcgttataatgatttgcgagaagcgttagaaaaattgcaattaaatgatgcggcgttacaattcgaaccagaaacctcacaagctttaggctttggtttccgttgcggcttcttaggtctgctacacatggatgtagttcaagaacgcctggagcgtgaatttaatcttgaattgatcaccacggcaccatccgttatttaccatgtaaacttgactgacggcacgcagttgattgtggataatccttcagattttcctgatccatcaaaaattcaaaacgtagaagaacctttcgtgaaagctaatattatggtaccaaatgattatgtcggtgctgttatggagctttctcagcgcaaacgtggcgagtttattactatggattatctagatgattatcgcgtgaatgttgtttacaatattccattgtcggaaattgtctttgacttctttgataaattaaaatcaagtacaaaagggtatgcctcattggattacgaaatggctgattatcgcgaaagccgcttagttaaaatggacattctattgaatgctgaaaaagtcgatgccttaagctttatcgttcaccgcgaattcgcccaagaacgtggccgtgcaatcgtggataaattgaagaccttaatcccacgtcagcagtttgaagtaccgatccaagcaactattggtaccaaaatcgttgcccgtacagatatcaaagctttacgtaaaaatgtattggctaaatgttacggcggggatgtttctcgaaaacggaaattgttagagaaacaaaaagaagggaagaaacggatgaaacagattggctccgttgaagtccctcaggaggcattcatggctgttctgaaaatggacgaagatgaacctaagaagaaatagcttttttgaactacgattaaagttatgaggcgttggatcagtgatcctacgcctttttatatgttcatatagttggaactggcaagtagatgagtctgattcttgattgaaaaagaagctccaacttgaaaatttagctatatttaattaattacataaaaataagaaaagcatcacaggatataccaagtaaaaatgtcttagcggattaatcgaataattatctatttcttcaaaagcttgaatttactaactactggcaataaaaatttcatagcttactgaaaaaaatgaccatcattttaataattgcaatgatacgattggagcactattaaaaagaaggtgatggtcattaataaagtcgtatatctattcaaaatttctttcggattagcaattatctctttagccttgaatttctttttattaccgcataatatcgcttccgcaggggttggagcgattggtcatttacttgaactgagatggtctgtcagtagcatttatacagtttggttcattaatctgttcatgctcgtattgacctatattatgttggacagacaagttttttctaaaatatttttaggcagtctgctttttcctatttttttaaaggttattccagcgaaccaagtattattttctcatatggcttccttaattataggtagtacattgtttagtttgggagtattttttctttataaatccaactcgtcaaatggaggaattactatccctcccattatactcgaacgctattttagaatacctactcatcgaggattgttgttaactaatctagtcattatttttttgaatttctatattttgagaccggtagatggactttttgcagtgttatcgattctaattatgaccttctctatgaaattatacacagctattgataataaatggctgatacgagaagcaggtaatataaatatcaatgagtagagtaccaagctgtcaataggatattggcagtttttttttagacaaaattagttattattttatgtgtcgattcgatgcgttgctgtactttattatcatgttagttgatttattctgaaacagatgactgagaataaactctttgtaatcacagcttgctacgtaatagtcatttgagtatactggttaaatgatgtctcattctagctgtatttctattttgctaatgtattctaaataagaaaaaatcacagcttcgaattttttatcaaataaatatgatttttggattttaggacaaatacaatcaagaaagggcatatttatggaacgaattaaagctctattatcagaaaaatatggttatacgcaatttcggaatgggcaagaggagatcattcaaaaggtattgcagaagcagaatgttttagggattatgccgaccggtggcggaaagtcgatttgttaccaattaccggcacttgttctggaaggtttaactttggtcatctctccattgatttccttaatgaaagatcaggttgatagtttgaatgaagtgggtattcctgctgcgttcattaatagtactttgtccaatcttgagatgaatgaacgcgtgcgaaaggcagcgcgcggcgagatcaaattgctgtatgtggcaccggagcgcttagaatcagcggattttcgcgaattgttgcgttatgttccgattgaacttttagcagtcgatgaagctcattgtatttctcagtggggacatgattttcgcccaagctatttaaaattagcggaaaccattgcgaatttcgatcaacagccgacaattatcgcgttgaccgcgaccgcaactccacaagttgcagatgatatttcaaatctattacatatttcaaaagaaaatgaaattaaaacgggctttgcgcgagaaaatttggcgtttcaggtagtgaaggatcaaaaagatctgtatttgacggagtatttaaagttaaatcagggacaatcaggtattatctatgcttctacccgcaaagaggtggagcgtttgtatcatttattgaagcaccagcaattttctgtcggtaaatatcatggtggtttgaatgatgccgagcgtatgcagaatcaagaggattttttatttgaccgcattgaagtgatgattgccactaatgcttttggtatggggatcaataaaagtaatgttcgttttgtgattcacgcgcaaattccggggaatctggaatcctattatcaagaagccggtcgtgctggtcgtgatggattgccaagtgaggctgtcttattatacgcgccgcaggatcttcaggttcagaaattttttattgaacaatctcaatcagaaagctcgtatcaacaaaatgaatacacgaaattgcgagaaatgaatcaatatgggcatactcaaatgtgcttgcagcgctatattttaaactactttggtgaggatcagccggattgcggaaaatgcagcaactgtttggatgatagagaattagttgatatcactaccgatacgcaaaaagtgttatcttgtgtaaagcggatgggagaaaaattcgggaaggccctagttgcaaaagttttaactggttcgaacgatcaaaaaattaaacaatggagctttgaacagctgccaacctatggcttgatgaaggagtattcgcaaaaagaagtgtctggcttgatcgactacttgacggctgagcattatttagtgccttctgaaggacaataccctctactaactgtttctgaacaaggaatttcggttcttttaggcaaacaggaggtctatcgtaagcaagcacctgtgaaacaattagttgcagatgacgcactttttgaagagctgcgaagcttgcgttctcaactggcgcaagaaaaaaatctaccaccatatgtgattttctctgataaaacattgatggagctagcagaaaagcagccacaaacctctctagaatttctacaaatcaaaggagtcggcaaaagcaagttggataattatggcgagcaatttttagcgcttttgaaaaaggaaaattaatcgttaaaaaaaggctcttcgtcaaatcgtgttggtgaagacaaatttgaataaaacttagtccgatatgcggcgcgttctgtgcgccgcatatttttttagttttcaaagatcagaccttgttgtaaatagatccgtgcccgaaagttataaaagttgcgataaccaaacgcaattcgtttaatcagcttgatcttgttattcagcccctccgtgacaccgtttgagtgggacactttaaaggcatttgaaatgcccgattggtagcgatggaagatcgtgaatttctttttaaacgactgaggtaacgtagatgaaattgttttaagggtttcttgaaagccttccgtatctcgtttaacgaaataatagcgtaataattgacaaaaatgatacgctgttcgcaattcttcgttgtagcttaacagttcatcgacgatttctgtttgactaattggtcgtttaaacagtcgatgataatgccgtttgagtggctccaatgtcgtggaatctttgagtaagagtttccaatatcgcttgagccgacggtacttcttctgattttcagagtgtgaggttcgaaaacgattcatgatctggacacgtaattgattgaaactgcgattgatgtgttggacaatatgaaagcggtcagttacgatctccgcatttggaaagaccgttttaagcaactgacaatagctggcattcatgtccatcactaggtacttgacctttaaacgggcctttctaggaaagcgcaggaagtattgagttagtttgtaaagtctgcgatcttcaaggatcgtaaatagctgattggttgtcccatcaacacaaataaaactcatggaaccagaaacagacttcattgatttgaactcatccatacacaacaccgtcggaaggaagttcatacgtggctggtaatgcttcgttgcttcacgcaagatccgtgtcaccgtcccatccgagacgaagtacttcttagcgattagtttacgtgattgattttcgtacagttccatgagaatcgcctgcttcagttcctttgttagttgatgatgttcatcaactaagtccgttttcgcagaaaaggtccgtccacaatcatggcagagaaaacgggtacgttttaattctaaaatagttaacttttctttgactttcaacatctgagtgcgtgtcgtataggaaccgttgcggataatacgaaccgatcgacagtgttcacaacaggaaggagagtcatccaattttcctttaataaactgcgcttgaacgcctttatattctttttcaatcagccattcttcatcaaaaaataaatgtttatctgttaatccgagtaattttctagtatgattatccattgagagactcctttggtagggtgacgttttggtcgactaaattttaccaaaagtgagtctctttttgagttgaaacgaagaaaaaagtgttagtagaaaatcgccttcgattttccaccaacacaaaatattatagaacctaaaaaaacacgttctcactttggctgagagcgtgtttttttgatcagtgagtattagtttgtttcaaagattcgcgggataattgtatcgattcgcaacaattcatcctcagaaagcgtctttccatcttttttccagacattgattcgacgctgctctttttctagagtgtagttttctgtcacatattttgctcgcggattattcagcagttctttaataaattgagcacgcaattggctaagcgtcagcccatgctctccttgttttaaaaaaggtgattcatagtggtaaacacgttggtcagttgaaactgttcctcgcatagtagtcctcttttctaagtctattagttctattttagcagtgtttcagataataaaaaatagctttcttgaagttcgtgaaagtagttattttggttaaattaatttaatttattgaattaaaggattaatggtcggctatttacgtgccaattcaaaaaagctttccaaagataaagttctttttcaataaacttttttttagaaagccagcgattaatcatccttaatcgttgtaattttgaaaagaaaggtttgagaaaatgccagaaatctggcaatcaattttttctcaatctcgataattcgaagatgccaagtttgaaaataggctttgattttgctgtgcttataaaactgcactcgaacaaagtccattaacaaaacagtgatgccgccagcaaaaccacaattatacaaattgattccagcagtaagatagtgtgtgttacgagtaatcaatgaaaagatcgcaccagaaagcgtgcctgttaccaacccatatttacgagtcatcggagaaagtgtgctggcaaaaagcataatcacaatattattcgttgtcgcggtatcttgatagaagaatagcccagttaggaacacaccaaatgcagggaaaaagaagtagcgaaatttgaagttatacatactaaagccggcgaaagtcaaaatagctcccactagaatcccgcttaaagggacttttaaaattagagtaaagatcacagctagatagccgtaaagtgaaaagcgggcgattttctttaaatccaaaagcaaatgcttcgttcgggtgatgtttcgtttataaaaggacaaaaagataagaaatgggacagtgaataaagcaactaaaaaggaaagtaacgcgtagtgatgatcaaaggaaagggcgtgaggcacgatttttattgctaaaacgtcctcgtggccaagtttccaagaaccccaatgaagccagcggaaaagcccatgttataaaggtttaactctttggtgtggacctttaaaaattcgaagatcggcagaattgtgtagccgataaataaccccgctgccaaggctatgaacgtatttgaaatgaaaaaatgatccggcgcacaataaatcgtgctaacaataggcgagaggcaagtacttaagaggcccatgaccaataaatcctgtctgtcagaatgatgaattcgcgaatacagcaggcatcctaaaatgatcggcgcagagttgatgatgttttttccgaaaaatgaaaaaccagaaagcatcataatgactgaaacagtcaaggaacaaaaatggtgtttatgctttcgcaaaaggaacaggctgcttaaggttaatagtccgctgtttaaaaatgcgggtccaactcctgcgatatggacataatctgtaatcaaattactggaagactttatgatccgcagcattcccatagtcagttcattcgggctagcaagaaaaaatgcagatagcgtaagcgccaatccataagaaagcaaaaaaataaaaataatatttgtcgaaaataacacgtgttttgttttttccaaagcttcacactcctttagttgacctgaacgactgttacacccatttttcgaatctcttctaacatttcttcggaactaaattgatcggtgatgaaataatcaaacgcggagatatcacacattttaaccttcgaggttactccgactttccgatgatcagccacaagaattttacatctggtggcgcgtttgatcattatctcgttaatcgtcgcttcgctcatggtcttggttgtaaccccattttctaaatctatgccactgcagccgacaacacagacatccgcattgatgacagacaaggtgttgatagcaacatcgccgactagcgcttcttttggataacgcatttctccgccggtcaggacgtaattgtaattggcatggtgttgggaataattgattttcaagttattggttatgactgttaaatgatcgacatgtaaaaaatcaatcgtctttaacgcggtcgagctgacattaatgaagatcgtgtcacaatcatgaataaatttgctagcctccttggcgagtgcctgtttgatgcgaacgggacctgaatgatcgtcatcaggcttattctcataattaaacatgcagtagccaaacttgcgaataatatcgtttttttcttctagtaaatgcaagtcacgtctgactgtactgagggaaacatccaaagcttcggctaactccaaagtagtcatgtgttccttcttttccagaatatctaaaatatctttatggcgtttatcgatgttcatgatcgagtttttcattaaaaagcctcctatataaacccttcaaatagcgaaccaatgaaaagaaagcggttttatatgagtttattatacattttttaatggtgaaaagacataaaaagtcataaaaaatcattcaagtatataaatttttcgggtgctaagatcgaatagagcgaaaaagaagttaagacttaagacctatagcagcgactatatttttccgttagaatataggtaacaagttacttatatttaaagttatcgaggtggtccacatgaacattgaaagtttaacagaagcctacaaaagcgggcgtgataatcaacagcgagcgatttttgctagtttattcattttgggtaatcgcctgcaaacatccttcgacaaagtagatccagtcataacagtgaagcagttcatggtgctgatcatggtcaaacaggtgccagaaaagaccttggatttgaccagctgcggggagcttttgggatgttcaagacaaaatatcaaaaagctggcggttgccttggaaaagaaagaactaatcacgatcagtcgaaataaaaaagacagacgaagaacggatttgtgcctgacagaaaaaggagaatcttactttcagttagtcgcaaagctgcatgacgaggcccttcattcgatttttgaaggttactctgatgatgaattaacgaatttttttatcattttaatgaaattgtactcaggtgtcgaaaatctggaagaattagcggcaaaaaaacagggaggaaactagtatgaacacgattgtgatttatgcaacaaaaaaaggaagttcagaattatatgcgaagacctttgcgaaaaataacaagtatcagatttttaagcaggaacaggtttcttcagaagagctggcaaaggcagatgaagtttattatttcggcagtgtctatgctggaaaagtaataggtttagaagaactgaaaaagaaactatctggtaatagtcatttgacaatcatttctgttggcttgacagcagtcaaggatcaggaaaaattagctgaaattcgtgagggtgtttccaaggagtttcctcaggcgagcttttaccatctaagagggcggttaatcaagcagcagctaaatatgccggaaaaaatcattttaaaaatgattagtaaaagcagcaagaagaaacctattcaggagaaattggagattgaaaaagcaattgaacaagcagtggatgagggaagtgtcgattgtatcgatttgtctgaattagagaagattgggtaactgttaaaaagcagaagggattgatggagttataggaaaacgaataatgattattttagttgttgccattttactcgtggtttgtgtgaaagtaggcgctgattttttgacgaagcgtacattgaagaaagttaaaatcaatgaagtgccgatttctcaagtagcagatggagaatatgtgggagaagcacaaatcaaacctgtttcagcaaaggttaacgtgcaggttgagaacgggaagatcaccgatattgaaatcaaagatcatatgactggtttaggaaagaacggtgagaaaattattgatcagattattaataaacagagcttggacgttgacgcaatcagcggtgcgacccaaagcagcgtcacaattacgaaggctgtcgaaaacgcactgacacaagaaaattaatttttctctatcttttttctccatgttgaatttggttctattgctagatataatagatgtatcaaataggaaagcagtcgattgatatgttctatatcatttacaataaagtgtgcattgaaatttgctccgcacaatcgaatacgatgaaacattgtacggagcctaatcgaaataaatcttcatcagtcagctagagtgatcagaaattagctaatttctggtttattcaagatgtctgcaagattttacaaggccattgacagtgtttttgtcaatggcctttttttgcaatttcatgtgcgtaaagaaggccatgtcatcggtgaccttcttttattttttgtaaaaaaaataaaagggatgagaacatgagtaattttcatgatttaacaacaggcagtgtcacaaaacaattaattcgttttgcgattccactttttttagctaatctattgcaatcactctataatatcgctgatatgctggtggttggaaggattgttggaagtacgggcgtagccgcaattagtaatgcgtcctccttagtttttattgtcaatgcgatttgcatggggattacaatgggaggcaccgtgctaattgctcaatatcgaggtgcgaaggatgagcttagacaaaaaaagacaattggaacaatttacgctatgacggcagttgttgctatcctaatcacctgtgcgggtattttcttttataagcagatcctaacctggatgaatgttccaaaggaggcctatcaagacgcctgtgattacatgatggtgatttttatcggaactatttttgtgttcggttataatgccacctgctcgattttgcgaggcttcggcgattcacggagtccgctgtactttgtcatgatcgcagcgggaataaatgtcttgttagattatttattggtaggcgtattcagttttggtactgtcggagcggcttatgcgacgattgtctcgcaagccatttcgtttggtattgcgattctttatttaagaagacagaattttatttttgaatttcaactatcaagttttaggattgaaaaagccattttattaaaacttgtacaggtgagtttgccaacagcgatccaaatgaccgtagttaatatttcgtatttactgattgcagtcatgatcaataagtacggagtagtcattgccgcagcagcgggaatcggtttgaagatcaatacctttgctggcatgccttgttgggcaatcggtcaagcagtaacgacaatggttggccaaaatatgggggcgaagcttttaaagcgaactaagaaaatagtacagattggatttttcgcaagcattcttgtttctttgatagctattttgttcattcaagtatttgctgaaccgctgattcgcttatttgatccagaaaatcaagcggtactaaaggcgggcgttgtatatttgagaatctgttgctgttggaatagtttgttttatgcaacgatgtacaactttgattcttttgcagtgggggttggatttgccaatcttggcatgattaacgcactgttagatgcattggtcattcgtttaccgctgtgttggtttttaggaacactgctggagtttggtgttagagggatttactgggcacaagcactatcaccgattattccggcttgtatcggaatgctctacttcttcagtagaaagtggcagcaacgaaaactaatttaaaaaaatagcgtgtctgcttctgctgatcagaaacagacacgctatttttgttggccaaagaatcatgtgcgttacaaataatacttaaacaggtctggtaaatccacacgaacaagttcttcggaagctagcaccagttgatttttcgtatcatagacggtccccttatgctgaatcactgataggccgctttgaacattgaataacgctgcttgctgatccgttaattgtttgatacccacttggttcattcctttaacttttggctctatttcatgctttgccagtgcttcataaagcgatccggaaaggtcacattcatgtaaaaatgtaaaatctgtaggtaaataatttttttccagcatgattgccaccccatcgaccttacgaagacgctcgaccataatacttttgtctgagccaaaaagagtagtaaaatccgctgggacaagcgtttctttcactgcaagtacttctgaagtaagcttttttccctgatcaagacaaacttgagtcaaggataagcttttctgcatttcctgattctgattttttacaaaggttccttttccttgaaggcgggttaaataaccttcctccaccaactcatcaatcgcttttcgtactgtaattcgactgacatgaaagctcttttgaaattgcgcttcagaaaggagcttatctcctgcgaccaactctttttccttaatctgttgaagaatcgcttctttaatctgtaagtagagtggtttatgttcatcaattatctttcgaaccattgctacaccgcctttttctcaattataagcaaaaaatcataatagttcaactataggacaagttttataatcagttctatacatgtgttgacttgtatctttacttgtattaaactcatcgtgtcgataggcagataagtattttgataatgaaaggaagaaacagaatggaaatcaaagaaatgatccaaacgattcatgaagagaagcaatcaatcggaggcatccaacaggtgatttggttagcggcaggaggaagctatggcggtttttatccagggcattatttcttagatcaggaatctacgaaattgcgttcgaaaaatgtcaccagcaatgaatttgtcaaagcaccgccagcctttgttaatgaaacaactttggcagttgtttgctctatgcggggaactccagaaacgattgaagcagccaaggtggcgaaaaagctcggtgcagcaacaattgcgttgtatattgatgaatctgaattaaccgaggtttgtgactataagattcattatgattctgttgcggtggatgagagtgatttttctaagacaaatgctgcttatgggttgaagctagctatgacagtgatggacgttgtggagggctacgagcacatgactactgccatgaagagttttgaagaaatcgacgcgctttacaaacaagcggtcaaggatattcggacaaaagcaatcaaatgggcgcttcaaaatcgcgactctaaatccattcatgtcatgggtagtggtgccgcatatggagcagcctacattttctcgatttgcaatattatggaaatgctgcaaattgattcaccaaccgtcaatagctgtgatttcttccatggaccttttgaagtgatcaatgaagaaacctctgtttttcttctaattggagaaggcggtagtcgaccaaacgatgaacgggcggcgcgctttttacgagagtttggcggaaagaaagtcttcgtattagactcacaggagctaggattaagtcacattgatccaaaggtttcagagcattttaatcacctgatcttttctccgattttaaataatgtcttcatgcgagaacttgcttaccaaataaaaaaagattacacccaacgtacctatatgtggaaagcctcgtacaactagaaaagaagagctcagcgaatcataaatcgctgagcttttttatttcatcgtcctctttttggaacaattataatagtagaaaagcatctcctctcgcattgttgggaaacttcaaaaacaattctctcgaagactactttatcatttctccaaaaaaacgttcatcaacactctctccacacaatctctaaaagtcctccgtaagtgttgggagaggctggagatctttatgatagaagcatttataggctataacaaaagttggcacgccagttgcttatataaaagtgagaacagttataagaatgtcagttcaacttctcgtagttcgtgaagaaggccatttggtaaaaaggttgagtactctccaacaagaaacgacattcgcaacgaacgattaagtaggaggatagggaatgaacaagattattttagccagtcacggagatttttcacagggattaaaacaaacatcatcgatgatcatcggagatgaaggcaacatctttgctttgtccgcatttcgtgatgaagatgagccaattaaacgtcaggtagaacatctacttgaaaaaatcgggtatgaggatgtctatattttaacggacatttttggagggagtgtgaataatgatttgttagcgatccaacaagaacatccagaagttcatttgtttgcagggatgaatctaccactggtaatttcaattgccacacaatctgggaagatcacttcagaacaaatgaacatgattcttgaggaaagtcgtcaaggaatgattgactgcaaacaattattaacagcaaaaataaatactggaggtgacgatttatgattaagctagtacgaattgattatcggctgctacacggacaggtggttttttcttggaccaaatcgcaaggaatcaatcgcatcatcgtgatcaataacgaagcagcgacagacgagttcaaaaaaatgtcattgaacttggcgaaacccacaggtgtgaagttaaacattttcacagttgaggaagctctctctaaaatggcgaaagtggaaacattgaaggaaaatattatgttgatttttggcaacacgaaagaaacactcgctttttgcgaagcttacccgaaaatcaaagaaatcaattatggcgggatacctaagaccaatgacggaaagcaatttggcagtgcgattttcttgaatgaggaagagcagatggaagcaaaaaaattgaaggagatgggagtcaagcagtatatgcagcagataccaacttctaaatcagaggatttaaataaattaatttaaaaggagggctttaaatgttggttcaatcaatagttttaggattgattggtgtgttcgtcatgttggattcccgtttattgggccggttgaacttcgaacgtcccttgattgttgggactttggtgggtttagcattaggggatttggagaaaggattactggttggtgcatcgatcgaattgatttctttaggggttgttcaggtcggagcagccgtccctgcagatatgacattaggagcagttatcgcaacagcttttgcaattttatctggttcaaatgcggagacagctttgacaattgccattccaatcgctattttaggacaactattagggattttgatgcgaacagttttggcaagtttgactcaccgagccgatgcactaattgaagaaggcaagtttaagcgagtccagcatattcacattgtctggggaaccattctttactcactaatgtattttgttccgatcttcctagcgatttactttggaacagacctagtaaaatcaatcgttgacgcgattccagaatggatcactgatggattgaacttagcaagtaagttactgccagcttacgggtttgctttattgctgcaaacaatgttgtctaagaaaatgatgccgtttttggttttgggcttcttgattactgcttattcaggcttaggaattactggtgtagccttatttgcgggaatcgtggcctttgtcatgtatcaaattgaagcaaataaatctggcggcagcggtggcagcggaccggatcaagaaccagatgcactggacgatctataaaaggagggtaacaaaatggcacaagaaaaagatcaaaaccgtcgtaaatattggcaatttttctggcgctcatgggcaatccaggattcatggaattatgagcgtgcgatgaatatgggatttctttatggaatagctccaaccttagaccggatctataaagacccaaaggatgatgcgttgaagaaggaagcctatcaacggcatatgttgtattacaattgtacaccgcaaaccagtgcatttgttttagggctaacagcgtcaatggaagaacaatactatgaagatcaagaagggttcaatccagatacgatcaattcagtaaaaacctcactaatggggccgttatctggaattggagattcctttttccaagggaccgttcgagttttagcctttggtttaggaattaatttagcacaacagggcagtattttaggtccgattttagcaatggtcatctcctttgttccttcttttctagtgacttattatggcgggaaatttggctataatatggggaataaatatttgactaagttatacgaaggcggattgatggaccgtgtgatgtatgtctgctcgatcattggtctgatggttatcggtgcaatgattgccagtatgatcggtatcaccacaccaatcaaatttggtaaaacctttgtgctgcaagatgttttagacagtatcatgccgcaaatgctgccgtttgcattaacgatgttcatgtattggctgctgcaaaagaaagtaaatacaagtatcatgcttttgatctgtattgtcggcggtttaattttaagcgctttagggatttttgtttaatccggtagttggaactgaatgatgaaggtagaaataccgaatcgtttgtttctctaaataaaaaagaaaaaactgaggaggaattcagaaaatgaattcaacgatggaagcaaaagaaattatcaaagagattgtaggcaagcatgaggtaaaacacgttgttttcgtcggctgtggcgcatcaaaagcagatttgtatccagcaaaatactttttagaccaaaatgcgaaacaattacgcattagtcactacacagccaacgaattcaactacgcgacacctacttcgatcgatgagaccacagttgtgatctcggcttcacttggaggggcaactccagaaacagtagaagccaacgcgattgccaaagataaaggtgctacagttattagtttaacacgaataattgacgcgccgttaacaaaagatgcagattacgtcatttatcatggatttgctgaaaactatgcgacaaagcttgaaaaaacgggttattgcttattattagctgtagagcttctaaaccaagttgaaggctatgaacattatgacaaaatgatggatggctttgctaaaatctatgatttggcacaagaaagtgcggaatctgctcgtaaggctgcaaaacaattcgcacaacgcttcaaagacgaaaaagtcatttatatcatgagcagcggtgccactcacgaagttgcttactcatcttctgtttgcttaatgatggaaatgcaatggatcaattcaggaaccttccatgcgggcgaatttttccacggtccatttgaaatcgtcgataaagatgtcccattcattttattgatgaacgatggtaagactcgtgcgattgattctcgtgcattagctttcttagatcgttttgatgcgaaaacggaggttgtagatgcattagattatggtttgtcggctttcattgaaaaagaagtgttagattattttaacccattcgtgattactgccgtattcagagtgtatgcggaagaactgtcttatgccagagaacatccgcttactaaacgccgttatatgtggaaactctcttattagtcgcaaactaattggcggaaaaactgagatatttgtctcggttttttcgcattaaaaaaagtaatccttatgatcaaagaaatgctttacaatagaagcaaaggtacaagaaatcgattaaagcaggtgatgaaaatgaaaaaggaattagacgattacttatatgaacttaccatgaatctaaaggctggctccgatgaacgtttttcggcttatcaaatcgctgagtctctgcaattaaatcgaagtaccattagcagctatttgaatcaagcatttcgtgacggagagctagtaaaaatcaaaagttatccagttttatttttacatagaaaggccttagaggatgcgtctgtccaaatttctaaagtcgaatatgattcactagaggaactattttcccaggacaaaggaagcgcgctagaaaaaattattggtgcgaatggaagcttgaaggaagcaatcgaccaaataaaaacggccgttttgtatccccatcatggtttaccaatcttactgatgggtgtgagcggatctggaaagacttttttagcggaaaaaatttatgaatatgccaaagaacaacaggtaattgatgcgaaagcaccatttatcgcctataactgtgcgcagtattataacaatcctgagttattatcctcggctttgtttggacataccaaaggtgcttttacaggtgcggatcatgagcacagcggattgatcgaaaaagctgatgggggaattctctttttagatgaagttcatcgcctatcagaagaaggacaggaaaaattatttaccttcatggatactggcgagttttctccgatgggtgatacaagtattcggcgaaaggtgaatgtccgtttagttttcgctactactgaaaatgtctattccacctttttgcctacttttttgaggcgcttgccggtaattgtgacattgcctaaatttcaaaatcgaccacaatcagaacgcctgcgtttaattgattcttttttcattgcggagagcagcattttagaaaaggagctgcaggtatcctatcaaatgatcgattttttattgaatagcgatctggagggaaatgttgggaaaatcaagaatatcattaaatatgcctgtggcaacgcctatgttcatcagaagaaaaatcagacaatcaccgtgcgcttaaaggatctgccattagaatataatctgaaatttaaagaacagttcagcaaaccaaaaaagaaaatgtctgatcgtacgtacctgccgaatacagcacagcaaacacacttagaaagtaaggaaacacagctcttacggattttttttgacgaggtattaagtgacttcaaaagagtccagcaaaaagagagcctgacgcaagaattcatcgataataatgtagcacgagttactcaaatgatggatgaattcatttttcaaggtacttatgagaaggaagaatcgttgtattccgtcctgacctaccatattcgccaaacactggacatgatgtatgaaaattatggcttcgaacaggatggcaatcgcgtggtttccttagctagttatctttatttaaaagataatacagatattttaagcagtcattatgaatggcaggagcaaaaaaatgaactgctggaatttttagattcctttttggaaacccctttttggtatgctaagaagttgctaacatatttatcgcagcaattggaccagcaaatattggaagaagatattgtatttgtcaccttctatttttatagcttgcagatcagcgacctgccaaatgatgtgaaatgtattgtcttagctcatggctattcaacagctagcagtttagcaaacgtggttaatcgaatgctgggaaaaaatgtctttcaagcctacgatatgccgattaatattactcttgataaggtggaggcgcagattattcgttatatcaacgattatcggactgattcgggattgatcctgttagtagatatgggctcctttaatcaactaggagaacgtttgtctaaccatatcaaaagcccgttggtaattattgataacgtcagtaccccgcttgttctggaggtggggcagcatatcatcagcggcgatagtgtgaccgaggtttatgaagcgattaatgtagagaatagaatccagaagcagctgattattcctgaactaaataagaagaaagcgattatcacatgctgttatactggtatcggaagtgcgacacaaatccaagaaatcctactaaaatgtttaggggattctgcgaaggaattaaccattcttccctatgactatcataaattatcagagaataaaatgtatgaaacacctttccagttgtatgatgtattaatgattgtcggcacagaaaatcctaaaataaatcaggtaccatatatcggtctggatcagctgataaatggtgaggctgttggtgaattcgccgagctattgcacgaacaggtagacattgatagtgaagcctttaaaaatcaattgattttcaacttctcaatcaataaaatcgtcgaaaacttaacgatcctagacgccactaaagtcctgcgtttagtccaaaaggctgtgcaggaattggaacggttgatggctatcgagttttcaaacaatcagctatttttactttatatgcattgctgttccatgatcgaacggattttacgcaaggaaagtgtcgatgagcaggcggatatagaggagtatgtgcaaaaggaaggacacaatatggagttgattcatcaagcattccaagaggtcgaaaaggaatatacaattgaattacccttattagagcttcgtttattaaatgacattgtaaaggattaaggtgaaggtatggataaagcagttatttttgatatggatggagtattgatcgatagtgagccttactattttgagcgacgaatggacttttttaaagcgaaaggaattcaaccaggttcagataaatttgaagactatgttggcaattctgaaaaacaaacctggaagttactggtttctgaaaatgagacaaaacgtgaaaaacttcatcaagaatatcttgagtataaaaagcatcatggtattgattttaaaaaagctttgagaagttcggtaccgcaagtattaacaaaactatcagagaagggactctcaattggcttggcctcttcttctccacgcaaagaaatcaatcaaatgctatccgattgccagcttgagaaatacttttcatttacgatcagtggtgaagaggtgaaagaaagtaagccgaatccagaaatttacacgattagtcgtaaaatgctcaattgtccagactgtttggcggtggaggattctactttagggattgcttcagctaaagccgcaggtatttacacggtagctctaaaacaagctttcttaatggatcaacgagaggcagatgtagtaattaatgagctagaagaacttttaagcttaccacaactaatcaagtaactataaagaaattctccaacaaaaaatgctggagaatttcttattttgttgcaaatctaaattttttatattagaataacttcaatcaataattacgcattgaagagaagagtagttgatcgcgaaacgtttaaaagagaccctcagctggtgaaaagagggatcgtggaaaatcagtgaagatgagctctgagcattcagtttgttcacgcaagctgtacgggaagcgaccgttatatcgccgggtatgtctgtaccgttgaggtattatctgcgaggataatacgaataagggtggtaacgcgaaaatattcgtccctttatttatcagtaatctggtaaataaagggatggatatttttttatttgtcaaaaattaataggagtgtgtcgatatgaaaaagtttagtttggttttaatgattttgggaagtatcatatttttaactgcttgtggttcaagcgcagcaaaaacaacaaataaaatcaagattggcgcttcgccaaccccccacgcggaaattctcgaacacatcaaaccagaattaaaaaaagagggaattgatttagaaatcgtcaagttcgatgactatgttctacctaataaagcattagaaaacggcgacattgatgccaattatttttcaactgttccgtattttaatctacagaaaaaagaaaacggctataaattttcgaatgtaggagcaatccatttagaacctatggggatttactcacataacataaaaaaggtcagtgagataccgaacggtgcaaaggtgattgtttcgaatgtgccttctgaatgggggcggattttaactatctttgcgaaaaacaagttgataaaacttaaatcaggtgtggcgattgatcaagcttctttcgatgatattattgaaaatcccaaaaatttggtctttgaacatactgttgatccaacacttttaacgtcagcgtatgaaaataacgaaggcgatctagtagcgatcaactccaatttcgcctatgaaaaaggtttgaacccagtcaaagattcattaatgatcgaacaaaacgactcaccctatgtcaatattgtagctacgagaaccgatgataagaataaaaaagaaatcaaaaaaatcgtagaagcattacatgaacccaaagtccaaaaatggatcgagaaaaaatggggcggctcagttgtccctgtcaacgaataagaaagaataggtgatgtaaatggaaagagcaatttttgcaggtggatgtttctggtgtatggtcaaaccttttgatagtctgccaggtattgagtcagttatttcaggttataccggcggagaaacagaaaatcctaactatttggaagtaaaaagcggaaaaactggacatacagaggcagttgaaattatttttgatcctgaattgatatcctatgaagaattagtagagatctattggcagcaaaccgatccaaccgatgcatttggtcagtttgaagatcgcggaagtagctatcgcccagtgatttattattttaatgagcagcaaaagaaagtcgctgaagctagtcgcactgctcttcaaaatagcggacattttgaccaaccaatcgtgactcaaattgaggaagcctccaccttttatccggcagaagcagaacatcaggattactatcaaagaaatccagagaactatcataaaaatgctgagcgaagagaacagttcattaaagagttctggtaaaattttttccactcctttttagaaaagctcgtcattttggacacagattgagaggttcttttctttcaaaaaagttaaaatgaactgagaaggggtggataatcatggtgaaaacaacaattgaagctgtctttaatgaaccgattgaaaccatttggcatattgtaacagacttgacgaacgcagattggcgaagtgatcttagtagaattgaggttttagaagataaaaaggagtttattgaatatacgaatcaaggctttcccacaaaatttgtaataactgcatttgaaccactaaaactctacgtttttacaatggagaatgagaatatcagcggaaaatgggttggagagtttcaattattgtcaaagacaaagactaaaattcatttccttgaggatgtatctccaaaaaaaatttatatgaggccttttgtgaaaagctatttaactaagcagcaaaaacgatatgtagatgatttgactaattatttagcaaataaagaataagcaatgttttttgaagaatagctcgcaataaaatactgaaaaatagtagtgaataagccattcgactcataacaggagagacgaatggcttatttttttatcagtgattctttgtaaaatattccgcttctgatgagcgcttaaccagttgttctttatcaagtatttggaatctgcgtttttctcgttttaaaatagcgtcatcacatagtttattcaacagacgaagcaaatgacgatagctaatcccaatcgtggcggccacatcagtcaaattatcaaagaagtaatttttataggctccctgtaaaatataagtacaaagacgctgctctccagaataaagagcatttgaagtgtaattgtaagaactgctgatcaggttttctgataatccttttgctagtgtagtcataaaggtcagattttgaaacattgaatcttgattgtcttgaaagggaacaataatacactcaaaggctgaaagagtgataaccgatgcggtcgcgtaagtggtatcggacatcagttcaacatcaccaatcaatccgctagaaagataataggctaagaccaagtcttttccactaggagcactagtacacacctttgcttttccagaaacaacgatcataatgtatttatactccacaccttgagcaaaaatagtttctcctgaactgaactttcggactgtacagacagattggtgatctaataagccatatttatccagtaaatcaaggtggtgcttttccaagtcagtctccatttatttcgcctcgtttccttcacattaaaaagattacattctcattttactatgaatcttgtcttaaagctgtaaaagaaaaatactattcaaaaatctgatagaactaagcaatcctctcttttcgtatttttcatgataagaaaaggcattctaagagagtaattttctgttgttaaaaggagagtttagcgttccgtatcaagattaatacttttttgaaaattattttaaattatttgcatttttttaaaactcattcgtgaagtatgttacaatcattattgtaatgtaaacactttcaactattaggaggtagaatgaatgacaaaaacagtaatcgtaggtacaaaccatgctggaattgcagcagctaacacacttttggataactttccagatcaagaagtggtaatgattgaccgcaacgacaatcttagttatttaggctgtggaacagcgttgtgggtaggacgtcagattgattcttatgagggcttattctatacgaaacgtgaagactttgaaagtaaaggcgcacgaatttcaatggaaacaaccgtagatcgaattgactatgataaaaaagaggtccattgtttaacgaaatcaggcgatttctttgttgaaagctacgataaattgattttagcaacaggatctgtaccaatttctcccgaggtacctgggcgcgatttagaaaatattcatttcttaaaacgtttccaagatgggaaagctgttgatgaaattttaagcgcagataatattcaaaatgttgcagtaatcggggcaggctatatcggtgtagaaatagctgaggcagctaagcgtcgcggtaaaaatgtattactttttgatgcgatgaagcgctcattaccgagttattatgataaatggtttactgatgatatggatacgattttaagcgagcacggaattgacctgcactttggggaattagctaaagaatataaaggcgaagtaaaagttgaatcaatcgtaacagataaaggcgaatacagtgttgacctagtgatcaatgcgattggcttcttaccaaataacgaactgggaaaagaccatttagaactatttaaaaacggtgcttatttggtcgaccttcaccagcaaactagtgatccgaatgtctatgctgtaggcgattgtgcaacaatttattccaatgccttacaagacacaacctatatcgcactagcaacaaatgctgtacgttcgggtattgtggctggttataatgttggaggagtggcgctagaatcgaccggcgtacagggctcaaatggaatctcaattttcggcttgcatatggtttcaacgggcttgtcagtagaagcagcggctaaaaatggcattgctgtgaagtatacagactttgaagatctgcaacggccaggatttatgaaacaaaatgcaaaagttaaaatacggattgtctatgaagaaagttctcgaagagttgtgggagcgcagttgtcatcaactgaggatatttcaggagtgattcatatgttctcacttgctatcgaagagcaagtaactatcgataagttgaaactattggatattttcttcttgccacactttaatcagccatacaattacatcacaatggctgcattaagcgcagaataaaaatacagaaaaggagtcattgttcagacaatgactcctttttactaatctgcatttttcaagatatccaatattttctgataattttgattttgaaatatttcatagttcaattttttgtatagtttaactgcatgatgactccaggtttgagtattcaagtaaagatcctgacctggataatattcatgaagaagctcagtgacacgaatcgtcaaggctttagctaaaccctttcgctgttcttcaggtactacacctaaccagtgaagtcgcggtgagtgatcttcagtccaccaagctgtaaaagtagcaactttcactccctgaggattctctataaagagcatccgcttttttaattcctctggataaggtgcaaaggagcgttgaaaatattcagcggcggctttttcggtttcgaactctaacacagccgtttcaatccgacaccaatctttttcatcgccaggctgatgaaagacgatccgatagccgtcaggtaattggattttaggtagtgatggggcatttgacgggcgaaacatggtaaatggaataaaaggtacagacttatccaacataacaagacctccagttttttctcaataaaatcgtatcatgtagggatagtaaaagctagcttgattttagctaattatgaatgttactcaaacgtctgttttccataaaaacttctattataaaaaaaatggagacatagagacgaatctctattatataatgaaatgagaaatcagcttgtaggtttgtcagtggttgtcacaaagaataatttgttttgtgaggatgaacatctaataggatttttgagcaatgaaaaagttagggaggtaaaatttatggcaaaaagggttttctttagtttttattatgaaaacgatctatctagggcgttggtggttaaaaacaactgggctttgaaggagaatgaagaatctgggtttattagcaactcagagtttgagcgaatgaaacgggatggtgatgaggctatcgaacgctggatcgacaaacaaattgctggaacatccgtgaccgttgttttgattggaagcgaaacattagattctaaatatgttcaatatgcaataaaaaaaagttacgaactaggaaattcgattatagctttaaaaatcggcaaaattaaaaatttaagccagcaaacgtccatcagtcaatcagtagtaaaaatagttggaaaaaagaacaatggggaattactttggtttgatgaaatcattgataaagaatatgactacatcaaaaacgacggctataacaatcttgagaaatggattaatgaggtcgataaggtaaaagaaagataaggagcacttggatacagttttctagattttgaaatggcactcgctgatgacttgaaaaaaggagactatgaaagcgaatggaaaaattaaaggggaaaaataaagctgcaacgcttggagagaataaaaggacaagatattgaacagatcgttcagttcttgtccttttcatttattttgacaatgctaaagccaatgccttttggatcgccacaatatttttgtcttttctaaattgaatagtctcagcaggtaactcagcactagatatccaaatttttaattcggcatctagatcaaagtgaccgcttgtttcgactgaaaagcgtgaaatcgaacgataaggaatagatttgtactctgcctttttaccagtcacaccttgtttatccactaaaatcaaacggaaatctgtaaagacaatcaaatcccgaactagtttaaaagccaaagaaaccgtctctcctgatattaaaacatcctctaactttttttcaactgctttattgtcatgttgactagcatttcccattaaaccatcaaaaatactcatagatagattcccttctttctctgattgaataagttcattctagctgatttttaacagaaagactatcgaaagcgtacaatcgaataatcattccttcacaaaaatagtttttgttcttttttgacttaaatttccttgctaaacatatattgtttcgttatactcggtagggaaaagaactcagttataaaatggattcaggaggtgttctcatgtttaaaaactatcagcggtgactatgatctcaatcgttacttagagtttctaagcaagtagaacaattgaatttcctcccagaacctttttttgcgttgcattgaaagggttattccgcctacaattaattagtgcttaggaggaaacatacttattaagtatgtttttttgttgtgcttaaaagatcagtaaactgttgttgaaaacggttcaagtgaaaaaataaacttagaggagcagtaagatgaaaaaagtattaacagtagtaagttgcttattattgaccgcattggtcgtgttcgctaaaacagaacaggttcaagcagcaaagaagacgaacaaagttcaacgtttggtagacagtaaagatattaagaaggatgatttttttgtggatgcaaaatggttgaataagcagatgaaagacaatgataagaccgtagtaattgaggcttcttacggcgaagggaaagattataaaaaagctcatatcccaggcgcattgcatatcgacacgatggaaatcgaaactgaagaaaacaattggaatattttagatgcggaaacctgcaaggaagtcttcttgaaacgcggtgtgacaaagaccacaccagtagtcgtctattctagtgatatcaatgcggcagcacgtgtagcctttgttgcttactggttaggtgtcgatcaagtaaaaattcttgatggcggattgaaggcttgggagaaagccgattacaaagtagaaaaagggaaccaagatgccgaagctgcaaaagattttggtgcagctgttcctggacgtcctgaatacctgatctcaacctctgacgatttattaggtgcgaaagaaaaaaatcctgatctggttctagcaagtattcgttcatggaaagaatttactggaaaaacaagcggctatgactacattgaaaatgcgggtgagccagaaggtgccgtgtacgcgaaatcaagcaaaacgagtgctgatgttgctcaattaatgaacaacgatggcacagtgaaggagccaacgaaaatctttgatgcttgggaaaaatggggcatcactccagataaagaagttgctttttattgcggtactggctggcgtgcggctacggcgttctttattgccaaacaagaaggctttaaggacgttcgtctttttgatggcggctggtatgattgggataaagctcaccagaaggacccaagcaaataccctgttcaagttggcgacccaagagataaagacaaggtgaaaactctgaactaatgaagatctttcgctattttttgcacatcattcaatttggattgatctatggaatttatctgatgaatgatctctaccgtaatcatttaggttttatgcggaatgtttccttttattctcataaagtggatgcaagtctgttcggcagcaaattgtttttgctgccggtcttgttaacgattgttgcctttttagtagtaagaaagaaaaaaagtctagaatcactgttgttgttaatgatagcgattatttttctaatttggcagacaacaatcaccttgcaagtaatacccatttattatctagtgagcggaataatccttattggtttcttactgcaactagtgatcgttttgctaaaaaaggagtttgtttaatggattattcgaagggaacaattgaaatggctcgcttaatcgcggaaaattgtaccagttgtcaacggtgcatgaaagattgtctctttttgcagcagtattgtgatgatcctaaaaagctgtttcagcaatttttagcagaaggcttagaaccaatcgttccatactcctgtatgttgtgcggtcgctgtacagttgtttgtccgttaaaactgaaattagacgaagcctttttagcgatgcgtcaagatttaatcaaggaaggattaccgcttaaacagctcaaaagcgtcgaaatgcatcaaaaactatcaacaagcaaattatttacggctgtgaatcgaggagaagaaaaatgaaatatggttttatggcaggctgttctctaagctctagcagtccgaagcaagtcgcacaaatcatcgattatttaaaaggtttttatcctgatttagctgttatccaaggttgttgcggcaaaccgactcggatgatcggtcaggagcaattgtttcagcagcgctttggacaactatcagaacaggtccacaaggctggaattgatgaattgatcgttgcatgccaagggtgcataaaaacaatgactcttcaaaatcaatttcctacatcctcgttatgggtaaagatggccgagttaggattaccaaaggaagctatcggaaaagggaaaacaagtgatgttgttttttctatccaagattcctgtccaacgaaggaaatgacggagattcatcaagcggttcgctatctattggagcagttaggctatcaggtccagaaaaatcgtttgtcgggaaaaaacaccctctgctgcggaatgggtgggatgtgtggcgtttctaatccgaatctcgcgaaggattttgcagccaagcgtgtgcaagattttaaaactgatcatattgttacctattgttccagctgtacttcagccatgattcttggcgggggtgaggcttggcatttattggatttgatctttggagaggtaatacataaagacgacaaaagtcctgcgcatccactagataatccgatacgagcttggaagaatcgttatcaatcaaaaaaaatagtcacaaaagcataggagcaaataatgaagaaatggttaatcggtctactgacagcagggatgcttttttctctagctgcctgtaagaccagtgaaacaaaagaaacgaaaacaacagattctattagtagcttttctgaggcagtaaaaaaaggcaaaggtgaaacagtgaccttttacggatatggcggcgatgaaaaggccaatgcatgggtcgatgaagtggttaccccagccatgaaagaaaaatatgatattaccgtaaaacgagttccgatggacattgatcagatcttgaataagctgacaacggagaaagaagccggcacaaaatcaggtgatattgatgttatgtggatcaatggtgaaaatttttatacggcaaaacaagcaaaactgctttatggtcccatcacgaaaaatgtcgaaagctttgaaaagctgatggacgttgatggacataattcaaaatatgacttcggtgtcaaaattaacggctacgaagttccatatggcagtgcacaattagtttttgctggagataaagaaaaattcaaagaaggatttccgacagatactcaagctttgttagcctacgcgaaggaaaatcctgggaaaatcacctacacggctccaccagaattcactggcagcgcttttgttcgtaatattatctgcgatattgtcggctatgataaagttgaaaaggcgaaagccaacaaggaagagttatatcaggttattaaaccaggtctagattacttaaatgaaatcaaaccttatttatggcagcaaggaaaaacctatccgaccacaactgccgaattagatcaaatgtttgcggccggacaaattgatatgagctacagctatgctcagatgcatgtagcagaaaaacgtagcgataatgaatttaaagcaacaactgaatcattcttgtttgataaaggaacgatcgcaaatcaaagttacttagcgattgctgatacttctaaagacaaagcagcagcattagttttgattaatgaaatgacaagtgagtctgcgcagctaaaaaaagcggaggccaagtatggctacagcattccaccttttgactctgaaaaattatcagatgaaaaaaatcaaaaattaaccgatttgtataaaaatcaaggagtgctttcccttgagaaaatgcaggaaaaacaaattcccgaggttcaagcagagaaaatcccaataattgaagcgttatggaaagagcatgttttacatgaatagaaaaaaaatactcgttttgccttttattttgttaaacagcgttgtgattatcgcagcgctgtttaaagggctgcaaattagtttgggttattacccgttgattggtcttaaagaaatcacattagcaaatttccaacaggttttaaccgatcctttttttcaaaagtcgcttgtatacagctgctatttggcgctgactgcgacttttttgtcattgctacttgggacggctgtcgcgtttcttctattaaaagtaaaaagttcatggctacataaaattatcagtctaccgatttctttaccgcatattattgtgggcttgatgatgctacagttgattagtcaatctggaataatttctcgtatactgtttcaactgggattgattcaagaaatcggtcaatttcccttattcgtccatgactctaaaggggtaggaattattttagtttttttatacaaggaaattccttatgttgcggtgagtattttagcaattttgcagcaaatccagttaggttacattgaggttgctagaaatttaggtgcgtcaaatacgcgaatctttttcacgattgttttaccgatgattcaaaaaacattggcaactttatttattatcttattttgttttacatttgcttcatttgaagtaccttatctgttgggaagcccaagtaatcaaaccgtggctttgactgcttatgatctgtttactcaggcagatttgactacacgtcctctggcttttgccttgaacctaattatttcaggattttgcttagcagttacgttacttattttgaccattagtaattttttgccaggagggagaaaaaccacatgaaacttttatcaaagaagtcctatcttttgttggtattttctgcgctggccgtcttgtttcctgtattcattttagttctatggtcctttagtgataaatggatgtacccggctgtctttccacaggcaatggatctaaaaatcgtaagacaaatggtcaaagaacccaatttttttccggcaattattaatagtttgatgattggacttgcaacaaccctcgttagcattgcgattgctttgccggcagcgaactatctggcgtttcagaaaaggctgtcacagcgtttggtagaagtgattatttatcttccattgattttgcctgctattgcaattatcacttcaagtcaggttctttttttgcaattacgactaacaggaacttttttcggtattattctgattcatacctatttgtgtttaccttatgccatgcagctcctgctagaaagctatcgacagttaggcgagggatacaatttgacggcgcgaagcttaggggcgggtccttggatgactttttggcagattacttggcctctgctaagaacgggtgtgagtacagctgctggacttgtgtttattgtctctttcagtcagtatctaccaaccttttttattggtgggggtcgtatcgtcacactaccgctgttgctgctaccatatgctaataatgggcgtttcggattagcttcgtcctatagcttagtttttctaggctgtacctggctaggcgtatttattttgaaaaaagtaattggaggaatgaacaatggggttaagcgtcagaaacgtacagctaacctatggaaaaaaagaaatactgcatgatttatctttcgatgttcaggatagcgaaacgattgcactttttggtccttctggtgttggtaaaaccagtttgcttaaaatgattgcgggaattcagccagttgaaggaggaacgattgatttcactgagggattctcacaggaaagcaccgtgttagtttttcaagatttttggttatttccacatatgaatgtgattgataatatcggttttggccttaaagcgcgcaagtcttcaaagctggaaataaaacaaaaagtaaataaaattttagaggtattcgatttaaagagattagagcgacagtttcctgatcaattatccggaggacaaaaacaacgggttgcgttagcacgagcgatcgttttagagccaaagttgttattattagatgaaccttttgccaatctagatggacacttaagaagcgctatgcgggattatttgcgacggctgaaggagacttatcactttagtattatcttagtgactcatgatcgtgacgaggcctttcaattagcggatcgcatggtcgttcttttggaaggggcaattcagcaaattggtgaaccaaaagaaatttatttttttcccgagaatcgaaaagttgctaaagcaatgggagaaacgaattttatttctggaacagtcaatggtcataaattccagatggaagatgcagaaattactgttcaaaatccagcgagtatccatggagatgcggttctttttattccatctgggacagaatttacgattgaaaagatcgctggcgctggcatcccagcatttgtggaatttagcgagtggacacctaacggtcaaagatctgaaattagaattggagcaacaatctgtatgttcacaaatgtatctgaaaagctcgttgccggagaaaaaatcttcttaaccttcaatgagattttacaggtgatggaatgttgatttctattattattcccacattaaatgaagaaacgaatcttgaaaacttattgcgacaactaaatcagctagaaaagaagattccttttgaaattatcgtagttgatggtggcagtcaagatgcaacgattgcgattgcgagtgattatgcaaaagtttaccaattaaagcaggggaatcggggggctcaattaaaattaggggcagagaaaagccgcggtgaaatcttatggtttttacatagtgacagtcgtttagacaaccaatcagatattttggcgcagattcatcgagctgtagctaataaaaacaatagcgccggctttttaaagctttcatttgattcaactgagctcttttatcgttatttagctagaacttcaactttgcgtgcaaagtatcttgggctgatctttggtgatcagggtctatttacgacacgcgaaaactatgagcgggctggcgggtttgaaactgttccattaatggaagactggcggttgagtcgccgattgagaaaactcggaaaattctattatctacccgtgacaataaccacatctgcccgaaggtttcgaaaaggaaaactcaaagtacatttacgtatgcataaaataaaattgctctatttattaggaatgtcaccagaaaaattagcggaacgctattataaataggaaggagccattgatgttagaaaagattcagctctatatagaaaaaaatcaacttactaaaaaattgcgactacaaggaccttatacagtcaaattcttagcacagggtgaatacaatcaaaattttttgatctcggatgaaaaaagccgatatgtatttcgtttgaactacggtagtcaactacatttagacaaccagattcgttatgaatatcaggcgctaaagtggcttgaacggacgggacgaacacccaaagtatattatgttgatgacagccgtcaaagctttgatcaaggtttattgattatggagtttttacttggtgaaccgttagattatcacaaggatttattagaggcttccaaaatttttggtcgaattcataaacaaccaattgatgaaactgctgagaagatttttgtaaaggaaaaatctaccattttatctgcccgagtaactgagtgtcaaaagctgttagagccggtgctaaaaagtgaatttgttccattacaggctcaaaagcaactggcaagtgctttggatgattgtcaaaaaaatattcataaacagaaattttttattgatttggatcaatggtgtattaacaatactgaagtgaattcccataatttcattattgggaagcaaggatttttaatcgattgggagaagccagtcatcagtcatcctgtccaggatatttcacaattcttggcttcaacgaccactctttggcggagcaatttaattttaacccaaagagcaaaacgagattttttatctgattatctagctgaaacgcatgttgacgtagccacatttgaagaggcccttaggatttaccatccttatctaatgctacgtgcattgtcttggtcggcaatggcttttgacagctatcaaaaggatacgaagcaattaaaaaatcaggaaattttcgagaaagtttctagctatttagcagaagatttcttacgtcatgccttaaaggagcaagtctttgaataaatgtgcctatattttatttactcgtgttcctgtaccaaataaagttaaaacgcgtctgcaaagcttgctcagcggagaagaagcatgccaagttcaacaggaaattttactggatagttttcaaaaatttgaagggttaaatgaatgtggtatagatttatacttggcgtattcggatgaaggagatccagcgtccttactttctgcactaccaaaaaacttccattcttttcagcagcatggtgcgacaattgggcagcgaatgaatcacgcgatcaagcttgtttttgcaaaaggttatgaaaaagtggtactaacaggcagtgacatcccaaatttagatacgacaattattcaatctgcattccatcagatgtgtgagattgttttcggcccctcaccagatggtggctactatttagtaggctgtacacaatccattgatttaacaccgatttttgaaacgaatatctcttgggggaaaagtgaagtattgaaacaaacgttgcagcatttaacagattatcaggtggattttttgtctccgttacaggatgttgattatcctgaagatttaaaaatgcttcaacatgatctaaaaaaagaaaatcaatatttgatgtattggttagaggaaaatcgaggattattaaatgagaaaagtcatttttgattgtgacaatacatttggcttagcggatcatgatgtggatgacggattaacgcttctttatttgttaggggcaccaacgattgacttacttggtgtaactttaacctatgggaacggatcacttgaagaagttgaaaaaatgacaaaggaactccaacagcgtttgacgctatcttttgattattattcagcaaatcaagcagagtatctagtcaaacaagtcaatctctatccaaatgaaataaccatccttgcaaccggcgcattaacaaacttgtctgaagcactgagaatagacccgaatttttttaagaaggttcaagaggttgtcctgatgggaggaacaatcgaaccactaaaggtgaatcatcgcttagtcaccgagttaaatttttcttgtgatcctgatgctgcaaaaagtgtcttattgagtcaaacgaaccttacaatcatgaatggacacatgacctcggaagcattcttttcgcgacatgagatgaatcagtttttaactttagttgaaacaacaattaatcaagacacattgaaatggattcatcagacattggaaaactggattaaatggaatgaaaaggtatttggtttcagcggtttttgtaattgggatatgactacagctgtctacttagagcgtccggagttattcagccaagagcgatacaatctatcaaaaaatcagttgactcttactaaagggcgaatgacactgactgataaatctgactattctataaaaatgcctaaaaaaattttggatatagctgaattcaatcagctagtgattaagcgaatgacattagcgtttaaaaaagaggactaaaagcaaatattgaatctgattcaaaagaagggagcacatgtgaaaaagattatcgtctttattgcttttattttgttaggaatatttttggcctacaagtttggtttagttgattttctgacggatatttccagtttaagagcctacttagaagcacttggctggcagggttacgtgatttttattttactttcagtcattgtcgctgtgtttcttttaccgggacagtttctagcgattgttggtggactagcttatggcggacttcttggcggactattaacaattattggtgcatcacttggtgctagcatctcctttattattggaaaatacatcgcaagagagtatatattgaagcgttttggtaatgacccaacttttcaaaaaattgaaaagggcgttagagagaatggtatctcatttttaattttcacacgtttggttcccgtttttccttttgcaatccaaagctacgcctatgccatgacaccgatgagtgtaaaaaaattcagtttgatctcctttatgacaatgatgccggccagctttatttatgcttttatggcttctgaaattgctttaaagggagtttctggagctctgttattggaattaacagttgcgggaattttcttagctttgttagcatacctacctaagaagcttagcaaaaaaataaatcaattaaattctgaatacaaaaaataatagtaaacgaagaatcagaggatactgctctgatttttttgtttctcatgagttgatttttaaccgtacaagttaactacaactccattgttttcttttataagtcattctaaaataaagatgaaaggggagataaaggtggaaatgaatatcggaccaatcataatggagaagcgtaaggaaaaaaaggtgactcaacaggagttagctaattttataggagtttcgaaggcctcagtatcaaaatgggagaccggccaaacctatcctgatattactttacttccgcttttggcggcgtattttgatatcacgatcgattcactgctaacctatgaaccgcaattagataatcacgagattcaacgtatttatgcgaggttgaaggagtcattagaaacaaaatcaccagaggatgttttagcaaccattcgtagttttgttcggcgttattattcttgctatccattcgttttacaaatgggaatgtttttattgaatcatgcagatttacttccaggagaggaaaaaattaaaacgtataccaaagaagcacaggatttattcattcatgttcgaacacaagcaaaagatccagatttaattacacaagcattaaaatatgaggcctatacagctcttaatttacaggagtttgatcaagttttatcgattcttggagatcaggttcccgttttatttccaatcgaaagcttaatcgctgcagctcaacagcagaaaggtgaatcaaaaaaggctgttctcacgcttcaaagcgctatttatcaatatacgactgtctttttaagcttcttaactaattatcttcaactggtgattgatgaccctgataagttttctgagaccgtttcgagaggtaagagcttcgcaaaattgttcaattttaaagagatgcaccctgttgcgttgatgaattttcaattatcggccacttttggctatgcacaaatggaggatgagactgccgcacttgagatgttacaggcatttgttgagattttacaaggaacaacatttccggttgttcttcatggtgatgattactttgatcaaatcgatgaatggcttgaacacttagaaattggaaatcagttaccaagagattcaatgaaggtcaaagtggggttgttggaaatggtaatagataatcctacgtttgcacagttcgaggatcaggagcaagtgcaagaaatttttactaaacttcgatctattagagagcaggatgtgactgagaatgaataattttgatttttttaaagagaatctccctatttttattccactagttcttttggagttgatcttagtgatcgccgcggttcgacatgtcttgaagcacccgcattatcgttttggcaatcgagctgtttggttattaatcgttatcttgattcaaattattggtccggtgatctattttgtttttggaaaagaggaggatcaatgagcattctagagctgaagcaggtcaccaaaaggtttgggtcaaaaaaagtcttagataatttaaatctaacggtacccactggctcgattttcggttttgtgggagaaaacggagctggaaaaacaacgacgatgaaaatgattttaggtttagaggagatgactagtggagaaattctagttaacgagttgcctgtagtttttggcgataatcaaacaaatcatttgactgggtacttaccagatgttccagaattctatgattatatgtctgctcaagaatatttaagattttgcggagagatcactggtttatcaaaaaagcaattaaaagaaaaagttcctgagattctatcattggtgggcttaaagctggataaacgtaaaattaaaggttattcaagaggaatgaaacagcgcttgggaatcgctcaagctttattaaacgaccctaaattattgatctgtgatgagccaacttcggccttagatccaagcggccggaatgactttctagaaatgttggcgaacctaagggggcggataaccattttgttttctacccatattttgggtgatgtcgaacgaatttgtgattatgtcggtattttagatcaaggaagactggcggt
